(19) United States
(12) Patent Application Publication
(10) Pub. No.: US 2012/0207743 A1
(43) Pub. Date: Aug. 16, 2012

(54) Inhibiting Aberrant Blood Vessel Formation Using Retargeted Endopeptidases

(75) Inventors: Birgitte P.S. Jacky, Orange, CA (US); Patton E. Garay, Long Beach, CA (US); Yanira Molina, Tustin, CA (US); Joseph Francis, Languna Niguel, CA (US); Lance E. Steward, Irvine, CA (US); Sanjiv Ghanshani, Irvine, CA (US); Terrence J. Hunt, Corona, CA (US); Kei Roger Aoki, Coto de Caza, CA (US); Ester Fernandez-Salas, Fullerton, CA (US)

(73) Assignee: ALLERGAN, INC., Irvine, CA (US)

(21) Appl. No.: 13/372,018

(22) Filed: Feb. 13, 2012

Related U.S. Application Data
(60) Provisional application No. 61/442,769, filed on Feb. 14, 2011.
(60) Provisional application No. 61/445,030, filed on Feb. 21, 2011.

(51) Int. Cl. A61K 38/48; A61P 9/10; A61P 27/02; A61P 35/00; A61P 29/00; A61P 19/02; A61P 17/06; C12N 9/52; A61P 9/00

(52) U.S. Cl. 424/94.67; 435/220

(57) ABSTRACT

The present specification discloses TVEMPs, compositions comprising such TVEMPs and methods of treating a disease or disorder associated with aberrant new blood vessel formation in a mammal using such TVEMP compositions.

[0001] This application claims priority pursuant to 35 U.S.C. §119(e) to U.S. Ser. No. 61/442,769, filed Feb. 14, 2011; and U.S. Ser. No. 61/445,030, filed Feb. 21, 2011, both incorporated entirely by reference.

[0002] Mammalian cells require oxygen and nutrients for their survival and are therefore located within 100 to 200 mm of blood vessels; the diffusion limit for oxygen. For multicellular organisms to grow beyond this size, they must recruit new blood vessels by vasculogenesis and angiogenesis. In general terms, angiogenesis is the physiological process involving the growth of new blood vessels from pre-existing vessels and includes both sprouting angiogenesis and splitting angiogenesis (intussusception). In contrast, vasculogenesis is the process of blood vessel formation occurring by a de novo production of endothelial cells, i.e., the formation of new blood vessels when there are no pre-existing ones. Both angiogenesis and vasculogenesis occur in several biological processes under normal physiologic conditions. For example, vasculogenesis is critical during development as the embryo forms its circulatory and lymphatic systems. Angiogenesis is important during embryogenesis as well as in several processes in the adult, including the ovarian/menstrual cycle, growth, wound healing, and in granulation tissue.

[0003] It is believed that sprouting angiogenesis is initiated when biological signals known as angiogenic factors activate receptors present on endothelial cells of pre-existing blood vessels. In response to this signal, activated endothelial cells release proteases that degrade the basement membrane which allows endothelial cells to escape from the original (parent) vessel walls. The endothelial cells then proliferate into the stromal space surrounding matrix and form solid sprouts connecting neighboring vessels and migrate in response to an angiogenic stimulus. These sprouts then form loops to become a full-fledged vessel lumen as cells migrate to the site of angiogenesis and capillary tubes develop with formation of tight junctions and deposition of new basement membrane. Maturation of nascent vessels involves formation of a new basement membrane and investment of new vessels with pericytes and smooth muscle cells. Maintenance of new vessels depends on the survival of endothelial cells.

[0004] In splitting angiogenesis, the capillary wall extends into the lumen to split a single vessel in two. First, the two opposing capillary walls establish a zone of contact. Next, the endothelial cell junctions are reorganized and the vessel bilayer is perforated to allow growth factors and cells to penetrate into the lumen. A core is then formed between the two new vessels at the zone of contact that is filled with pericytes and myofibroblasts. These cells begin laying collagen fibers into the core to provide an extracellular matrix for growth of the vessel lumen. Finally, the core is fleshed out with no alterations to the basic structure. Intussusception is important because it is a reorganization of existing cells. It allows a vast increase in the number of capillaries without a corresponding increase in the number of endothelial cells. As such, sprouting angiogenesis is markedly different from splitting angiogenesis, however, because it forms entirely new vessels as opposed to splitting existing vessels.

[0005] Vasculogenesis occurs when endothelial precursor cells (angioblasts) migrate and differentiate in response to local cues (such as growth factors and extracellular matrix) to form new blood vessels. These vascular trees are then pruned and extended through angiogenesis. Although once thought to only occur during embryogenesis, vasculogenesis can also occur in the adult organism. Circulating endothelial progenitor cells (derivatives of stem cells) contribute to neovascularization, such as during tumor growth, retinopathies, and/or to the revascularization process following trauma, e.g., after cardiac ischemia.

[0006] Angiogenesis is determined by the balance between angiogenic and angiostatic signals. Angiogenic signals stimulate endothelial proliferation, migration and assembly into vessels and exert there effects primarily through endothelial-specific cell signaling systems including, e.g., vascular endothelial growth factor (VEGF), ephrin (Eph), fibroblast growth factor (FGF), platelet-derived growth factor (PDGF), transforming growth factor-α (TGF-α), transforming growth factor-13 (TGF-13), tumor necrosis factor-α (TNF-α), interleukin (IL), and other chemokines. On the other hand, angiogenesis is negatively regulated by the signals evoked by angiostatic factors such as thrombospondin, angiostatin, endostatin and vasohibin. Angiopoietin (Ang) 1/Tie2 signal is known to regulate both vascular quiescence and angiogenesis. The binding of these angiogenic factors to receptors in endothelial cells leads to a cascade of different signaling pathways resulting in the up- or down-regulation of genes involved in regulating the proliferation and migration of endothelial cells and promoting their survival and vascular permeability. Angiogenesis also depends on the survival of endothelial cells and this is supported by both autocrine and paracrine interactions in which pro-survival signals are secreted by endothelial cells, pericytes, and endothelial precursors.

[0007] Dysregulated blood vessel formation contributes to the pathogenesis of many diseases including retinopathy, macula degeneration, atherosclerosis, endometriosis, idiopathic pulmonary fibrosis, chronic inflammatory/fibroproliferative disorder, rheumatoid arthritis, psoriasis, and tumor progression. Both angiogenesis and vasculogenesis are increasingly being recognized for their role in promoting the pathogenesis of these diseases. In these pathological states, there is an imbalance between endogenous angiogenic and angiostatic signals, leading to an “angiogenic switch” which results in aberrant new blood vessel formation. For example, rheumatoid arthritis is associated with the unrestrained proliferation of fibroblasts and capillary blood vessels that leads to the formation of the pannus and destruction of joint spaces. Psoriasis is a well known angiogenesis-dependent skin disorder that is characterized by marked dermal neovascularization. The pathogenesis of coronary atherosclerotic plaque formation is a complex process that demonstrates features of exaggerated injury and repair including recruitment of mononuclear cells, fibroproliferation, deposition of extracellular matrix, and aberrant angiogenesis, which lead to progressive fibrosis, calcification, and eventual luminal occlusion. Idiopathic pulmonary fibrosis (IPF) is a chronic and often fatal pulmonary fibroproliferative disorder. The pathogenesis of IPF that ultimately leads to end-stage fibrosis demonstrates features of dysregulated/abnormal repair with exaggerated neovascularization/vascular remodeling, fibroproliferation, and deposition of extracellular matrix, leading to progressive fibrosis and loss of lung function. Tumors require a vascular supply to grow and aberrant blood vessel formation is associated with tumor growth and/or metastasis to another organ. Aberrant angiogenesis associated with chronic inflammation/fibroproliferative disorders has been shown to be analogous to neovascularization of tumorigenesis of cancer.

[0008] As a pathological state develops, the deregulated endothelial cells produce a wider array of angiogenic molecules having redundant functions. As such, if only one molecule (for example, VEGF) is blocked, the pathological process can switch to another molecule (for example, FGF-1 or IL-8). The field of anti-angiogenic therapy is now facing the challenge of overcoming resistance to factor-specific-targeted therapy. One approach is to administer a cocktail of different drugs to treat pathological angiogenesis. However, compounds and methods that can target aberrant new blood vessel formation using a single therapeutic molecule would be highly desirable. The present specification provides an alternative approach to resolve this issue of therapeutic resistance based on redundancy by providing molecules that can target several angiogenic pathways simultaneously thereby eliminating both the primary and redundant signals.

[0009] The ability of Clostridial toxins, such as, e.g., Botulinum neurotoxins (BoNTs), BoNT/A, BoNT/B, BoNT/C1, BoNT/D, BoNT/E, BoNT/F and BoNT/G, and Tetanus neurotoxin (TeNT), to inhibit neuronal transmission are being exploited in a wide variety of therapeutic and cosmetic applications, see e.g., William J. Lipham, COSMETIC AND CLINICAL APPLICATIONS OF BOTULINUM TOXIN (Slack, Inc., 2004). Clostridial toxins commercially available as pharmaceutical compositions include, BoNT/A preparations, such as, e.g., BOTOX® (Allergan, Inc., Irvine, Calif.), DYSPORT®/RELOXIN®, (Beaufour Ipsen, Porton Down, England), NEURONOX® (Medy-Tox, Inc., Ochang-myeon, South Korea) BTX-A (Lanzhou Institute Biological Products, China) and XEOMIN® (Merz Pharmaceuticals, GmbH., Frankfurt, Germany); and BoNT/B preparations, such as, e.g., MYOBLOC™/NEUROBLOC™ (Solstice Neurosciences, Inc. San Francisco, Calif.). As an example, BOTOX® is currently approved in one or more countries for the following indications: achalasia, adult spasticity, anal fissure, back pain, blepharospasm, bruxism, cervical dystonia, essential tremor, glabellar lines or hyperkinetic facial lines, headache, hemifacial spasm, hyperactivity of bladder, hyperhidrosis, juvenile cerebral palsy, multiple sclerosis, myoclonic disorders, nasal labial lines, spasmodic dysphonia, strabismus and VII nerve disorder.

[0010] A Clostridial toxin treatment inhibits neurotransmitter release by disrupting the exocytotic process used to secret the neurotransmitter into the synaptic cleft. This disruption is ultimately accomplished by intracellular delivery of a Clostridial toxin light chain comprising an enzymatic domain where it cleaves a SNARE protein essential for the exocytotic process. There is a great desire by the pharmaceutical industry to expand the use of Clostridial toxin therapies beyond its current myo-relaxant applications to treat other ailments, such a s, e.g., various kinds of sensory nerve-based ailments like chronic pain, neurogenic inflammation and urogentital disorders, as well as non-nerve-based disorders, such as, e.g., pancreatitis and cancer. One approach that is currently being exploited to expand Clostridial toxin-based therapies involves modifying a Clostridial toxin so that the modified toxin has an altered cell targeting capability for a non-Clostridial toxin target cell. This re-targeted capability is achieved by replacing a naturally-occurring targeting domain of a Clostridial toxin with a targeting domain showing a selective binding activity for a non-Clostridial toxin receptor present in a non-Clostridial toxin target cell. Such modifications to a targeting domain result in a modified toxin that is able to selectively bind to a non-Clostridial toxin receptor (target receptor) present on a non-Clostridial toxin target cell (re-targeted). A modified Clostridial toxin with a targeting activity for a non-Clostridial toxin target cell can bind to a receptor present on the non-Clostridial toxin target cell, translocate into the cytoplasm, and exert its proteolytic effect on the SNARE complex of the non-Clostridial toxin target cell. In essence, a Clostridial toxin light chain comprising an enzymatic domain is intracellularly delivered to any desired cell by selecting the appropriate targeting domain.

[0011] The present specification discloses a class of modified Clostridial toxins retargeted to a non-Clostridial toxin receptor called Targeted Vesicular Exocytosis Modulating Proteins (TVEMPs), compositions comprising TVEMPs, and methods for treating an individual suffering from disease or disorder associated with aberrant new blood vessel formation. A TVEMP is a recombinantly produced protein that comprises a targeting domain, and a Clostridial toxin translocation domain and a Clostridial toxin enzymatic domain. The targeting domain is selected for its ability to bind to a receptor present on a target cell of interest involved in neovascularization or angiogenesis like endothelial cells, endothelial progenitor cells, tip cells, stalk cells, phalanx cells, mural cells, pericytes, or macrophages. The Clostridial toxin translocation domain and enzymatic domain serve to deliver the enzymatic domain into the cytoplasm of the target cell where it cleaves its cognate SNARE substrate. SNARE protein cleavage disrupts exocytosis, the process of cellular secretion or excretion in which substances contained in intracellular vesicles are discharged from the cell by fusion of the vesicular membrane with the outer cell membrane. This disruption prevents many fundamental processes of the cell, including, without limitation, insertion of transmembrane proteins including cell-surface receptors and signal transduction proteins; transportation of extracellular matrix proteins into the extracellular space; secretion of proteins including growth factors, angiogenic factors, neurotransmitters, hormones, and any other molecules involved in cellular communication; and expulsion of material including waste products, metabolites, and other unwanted or detrimental molecules. As such, exocytosis disruption severely affects cellular metabolism and ultimately cell viability. Thus a therapeutic molecule that reduces or inhibits exocytosis of a cell decreases the ability of a cell to proliferate, migrate, and/or survive. Based on this premise, the TVEMPs disclosed herein are designed to target disease or disorders associated with aberrant new blood vessel formation, where subsequent translocation of the enzymatic domain disrupts exocytosis by SNARE protein cleavage, thereby reducing the ability of a cell to survive or promote aberrant new blood vessel formation.

[0012] Thus, aspects of the present invention provide a TVEMP comprising a targeting domain, a Clostridial toxin translocation domain and a Clostridial toxin enzymatic domain. A targeting domain may be an apelin targeting domain, an anthrax protective antigen (APA) targeting domain, an angiogenic factor with G patch and FHA domain 1 (AGGF1) targeting domain, an angiopoietin targeting domain, an angiostatin targeting domain, an angiogenin targeting domain, an endothelin targeting domain, an endothelial cell-specific molecule (ECSM) targeting domain, an ephrin targeting domain, an erythropoietin targeting domain, a hepatocyte growth factor (HGF) targeting domain, a netrin targeting domain, a brain specific angiogenesis inhibitor (BSAI) targeting domain, a Delta-like (DII) targeting domain, a jagged targeting domain, a semaphorin (Sema) targeting domain, a thrombospondin targeting domain, a chondromodulin targeting domain, a 16 kDa prolactin fragment targeting domain, a granulocyte macrophage-colony stimulating factor (GM-CSF) targeting domain, an Interferon-α (IFN-α) targeting domain, a pigment epithelium-derived factor (PEDF) targeting domain, a troponin targeting domain, a Vasohibin (VASH) targeting domain, a Urocortin (Ucn) targeting domain, a C-motif cytokine ligand targeting domain, a C—C-motif cytokine ligand targeting domain, a C—X—C-motif cytokine ligand targeting domain, and an endothelial-monocyte activating polypeptide (EMAP) targeting domain. A Clostridial toxin translocation domain may be a Clostridium botulinum toxin (BoNT) translocation domain, a Clostridium tetani toxin (TeNT) translocation domain, a Clostridium baratii toxin (BaNT) translocation domain, or a Clostridium butyricum toxin (BuNT) translocation domain. A BoNT translocation domain may be a BoNT/A translocation domain, a BoNT/B translocation domain, a BoNT/C1 translocation domain, a BoNT/D translocation domain, a BoNT/E translocation domain, a BoNT/F translocation domain, or a BoNT/G translocation domain. A Clostridial toxin enzymatic domain may be a BoNT enzymatic domain, a TeNT enzymatic domain, a BaNT enzymatic domain, or a BuNT enzymatic domain. A BoNT enzymatic domain may be a BoNT/A enzymatic domain, a BoNT/B enzymatic domain, a BoNT/C1 enzymatic domain, a BoNT/D enzymatic domain, a BoNT/E enzymatic domain, a BoNT/F enzymatic domain, or a BoNT/G enzymatic domain. A TVEMP may further comprise an exogenous protease cleavage site. An exogenous protease cleavage site may be a plant papain cleavage site, an insect papain cleavage site, a crustacian papain cleavage site, an enterokinase cleavage site, a human rhinovirus 3C protease cleavage site, a human enterovirus 3C protease cleavage site, a tobacco etch virus protease cleavage site, a Tobacco Vein Mottling Virus cleavage site, a subtilisin cleavage site, a hydroxylamine cleavage site, or a Caspase 3 cleavage site.

[0013] Other aspects of the present invention provide a composition comprising a TVEMP comprising a targeting domain, a Clostridial toxin translocation domain and a Clostridial toxin enzymatic domain. A composition comprising a TVEMP can be a pharmaceutical composition. Such a pharmaceutical composition can comprise, in addition to a TVEMP, a pharmaceutical carrier, a pharmaceutical component, or both.

[0014] Yet other aspects of the present invention provide a method of treating a disease or disorder associated with aberrant new blood vessel formation in a mammal, the method comprising the step of administering to the mammal in need thereof a therapeutically effective amount of a composition including a TVEMP comprising a targeting domain, a Clostridial toxin translocation domain and a Clostridial toxin enzymatic domain, wherein administration of the composition reduces a symptom associated with aberrant new blood vessel formation. Useful TVEMPs include the ones disclosed herein. The disclosed methods provide a safe, inexpensive, out patient-based treatment for the treatment of diseases or disorders caused or affected by aberrant new blood vessel formation.

[0015] Yet other aspects of the present invention provide a method of treating a disease or disorder associated with aberrant new blood vessel formation in a mammal, the method comprising the step of administering to the mammal in need thereof a therapeutically effective amount of a composition including a TVEMP comprising a targeting domain, a Clostridial toxin translocation domain, a Clostridial toxin enzymatic domain, and an exogenous protease cleavage site, wherein administration of the composition reduces a symptom of a disease or disorder associated with aberrant new blood vessel formation. Useful TVEMPs include the ones disclosed herein.

[0016] Still other aspects of the present invention provide a use of a TVEMP in the manufacturing a medicament for treating a disease or disorder associated with aberrant new blood vessel formation in a mammal in need thereof, wherein the TVEMP comprising a targeting domain, a Clostridial toxin translocation domain and a Clostridial toxin enzymatic domain. Useful TVEMPs include the ones disclosed herein.

[0017] Still other aspects of the present invention provide a use of a TVEMP in the treatment of a disease or disorder associated with aberrant new blood vessel formation in a mammal in need thereof, the use comprising the step of administering to the mammal a therapeutically effective amount of the TVEMP, wherein the TVEMP comprising a targeting domain, a Clostridial toxin translocation domain, a Clostridial toxin enzymatic domain and wherein administration of the TVEMP reduces a symptom of a disease or disorder associated with aberrant new blood vessel formation. Useful TVEMPs include the ones disclosed herein.

### BRIEF DESCRIPTION OF THE DRAWINGS

[0018] FIG. 1 shows a schematic of the current paradigm of neurotransmitter release and Clostridial toxin intoxication in a central and peripheral neuron. FIG. 1A shows a schematic for the neurotransmitter release mechanism of a central and peripheral neuron. The release process can be described as comprising two steps: 1) vesicle docking, where the vesicle-bound SNARE protein of a vesicle containing neurotransmitter molecules associates with the membrane-bound SNARE proteins located at the plasma membrane; and 2) neurotransmitter release, where the vesicle fuses with the plasma membrane and the neurotransmitter molecules are exocytosed. FIG. 1B shows a schematic of the intoxication mechanism for tetanus and botulinum toxin activity in a central and peripheral neuron. This intoxication process can be described as comprising four steps: 1) receptor binding, where a Clostridial toxin binds to a Clostridial receptor system and initiates the intoxication process; 2) complex internalization, where after toxin binding, a vesicle containing the toxin/receptor system complex is endocytosed into the cell; 3) light chain translocation, where multiple events are thought to occur, including, e.g., changes in the internal pH of the vesicle, formation of a channel pore comprising the HN domain of the Clostridial toxin heavy chain, separation of the Clostridial toxin light chain from the heavy chain, and release of the active light chain and 4) enzymatic target modification, where the activate light chain of Clostridial toxin proteolytically cleaves its target SNARE substrate, such as, e.g., SNAP-25, VAMP or Syntaxin, thereby preventing vesicle docking and neurotransmitter release.

[0019] FIG. 2 shows the domain organization of naturally-occurring Clostridial toxins. The single-chain form depicts the amino to carboxyl linear organization comprising an enzymatic domain, a translocation domain, and a targeting domain. The di-chain loop region located between the translocation and enzymatic domains is depicted by the double SS bracket. This region comprises an endogenous di-chain loop protease cleavage site that upon proteolytic cleavage with a naturally-occurring protease, such as, e.g., an endogenous Clostridial toxin protease or a naturally-occurring protease produced in the environment, converts the single-chain form of the toxin into the di-chain form. Above the single-chain form, the HCC region of the Clostridial toxin binding domain is depicted. This region comprises the 13-trefoil domain which comprises in an amino to carboxyl linear organization an α-fold, a β4/β5 hairpin turn, a β-fold, a β8/β9 hairpin turn and a y-fold.

[0020] FIG. 3 shows TVEMPs with a targeting domain located at the amino terminus. FIG. 3A depicts the single-chain polypeptide form of a TVEMP with an amino to carboxyl linear organization comprising a targeting domain, a translocation domain, a di-chain loop region comprising an exogenous protease cleavage site (P), and an enzymatic domain. Upon proteolytic cleavage with a P protease, the single-chain form of the toxin is converted to the di-chain form. FIG. 3B depicts the single polypeptide form of a TVEMP with an amino to carboxyl linear organization comprising a targeting domain, an enzymatic domain, a di-chain loop region comprising an exogenous protease cleavage site (P), and a translocation domain. Upon proteolytic cleavage with a P protease, the single-chain form of the toxin is converted to the di-chain form.

[0021] FIG. 4 shows TVEMPs with a targeting domain located between the other two domains. FIG. 4A depicts the single polypeptide form of a TVEMP with an amino to carboxyl linear organization comprising an enzymatic domain, a di-chain loop region comprising an exogenous protease cleavage site (P), a targeting domain, and a translocation domain. Upon proteolytic cleavage with a P protease, the single-chain form of the toxin is converted to the di-chain form. FIG. 4B depicts the single polypeptide form of a TVEMP with an amino to carboxyl linear organization comprising a translocation domain, a di-chain loop region comprising an exogenous protease cleavage site (P), a targeting domain, and an enzymatic domain. Upon proteolytic cleavage with a P protease, the single-chain form of the toxin is converted to the di-chain form. FIG. 4C depicts the single polypeptide form of a TVEMP with an amino to carboxyl linear organization comprising an enzymatic domain, a targeting domain, a di-chain loop region comprising an exogenous protease cleavage site (P), and a translocation domain. Upon proteolytic cleavage with a P protease, the single-chain form of the toxin is converted to the di-chain form. FIG. 4D depicts the single polypeptide form of a TVEMP with an amino to carboxyl linear organization comprising a translocation domain, a targeting domain, a di-chain loop region comprising an exogenous protease cleavage site (P), and an enzymatic domain. Upon proteolytic cleavage with a P protease, the single-chain form of the toxin is converted to the di-chain form.

[0022] FIG. 5 shows TVEMPs with a targeting domain located at the carboxyl terminus. FIG. 5A depicts the single polypeptide form of a TVEMP with an amino to carboxyl linear organization comprising an enzymatic domain, a di-chain loop region comprising an exogenous protease cleavage site (P), a translocation domain, and a targeting domain. Upon proteolytic cleavage with a P protease, the single-chain form of the toxin is converted to the di-chain form. FIG. 5B depicts the single polypeptide form of a TVEMP with an amino to carboxyl linear organization comprising a translocation domain, a di-chain loop region comprising an exogenous protease cleavage site (P), an enzymatic domain, and a targeting domain. Upon proteolytic cleavage with a P protease, the single-chain form of the toxin is converted to the di-chain form.

### DETAILED DESCRIPTION

[0023] Excessive blood vessel formation in a repairing or otherwise metabolically active tissue results in inadequate delivery of oxygen, nutrients, and other substances necessary to establish essential physiological functions to the area and promote wound healing. The formation of blood vessels within a tissue may occur by angiogenesis and/or vasculogenesis. As used herein, the term “angiogenesis” refers to a physiological process involving the growth of new blood vessels from pre-existing vessels and includes sprouting angiogenesis, the formation of new blood vessel by sprouting off existing ones, and splitting angiogenesis (intussusception), the formation of new blood vessel by splitting off existing ones. As used herein, the term “vasculogenesis” refers to a physiological process involving the de novo production of new blood-vessels by proliferating endothelial stem cells, and as such, the formation of new blood vessels when there were no pre-existing ones.

[0024] Blood vessel formation, whether angiogenesis or vasculogenesis, requires signals from growth factors and other proteins that direct and control the process, such as, e.g., fibroblast growth factors (like FGF-1 and FGF-2), vascular endothelial growth factors (like VEGF-A and VEGF-C), angiopoietins (like Ang-1 and Ang-2), ephrin (Eph), platelet derived growth factor (PDGF), tumor necrosis factor-α (TNF-α), interleukin (IL), monocyte chemotactic protein-1 (MCP-1) (also known as chemokine (C—C motif) ligand 2 (CCL-2)), transforming growth factor-α (TGF-α), transforming growth factor-βs (like TGF-β1, TGF-β2, TGF-β3, and TGF-β4), chemokines, thrombospondin, angiostatin, endostatin, vasohibin, vascular cell adhesion molecules (like VCAM-1), matrix metalloproteinases (like MMP-2 and MPP-9), integrins, cadherins, plasminogen activators, plasminogen activator inhibitors, and ephrin.

[0025] The TVEMPs and compositions comprising such TVEMPs disclosed herein, reduce or otherwise inhibit aberrant blood vessel formation mediated by angiogenesis and/or vasculogenesis by inhibiting or reducing exocytosis of a target cell participating in this pathologic process. Without wishing to be bound by any particular theory, the compounds, compositions and methods disclosed herein target cells involved in the primary and/or redundant cell signaling systems that stimulate aberrant new blood vessel formation. The TVEMPs and methods disclosed herein disrupt the ability of the target cell from participating in the multiple signaling cascades necessary for the proliferation, migration and/or survival of endothelial cells. This disruption causes the endothelial cells to become quiescent and/or die. For example, disruption of exocytosis in the target cell will stop the incorporation of receptors into its plasma membrane thereby preventing the target cell from binding and transducing signals from the pro-angiogenic molecules secreted by other cells or present in the extracellular matrix. In a similar manner, the lack of receptors that initiate the maintenance or survival cues will result in the generation of apoptotic signals involved in programmed cell death. Alternatively, disruption of exocytosis in a target cell will stop the release of pro-angiogenic molecules secreted by the target cells, thereby eliminating the stimulatory signals necessary to begin blood vessel formation. Likewise, inhibition or reduction of paracrine and/or autocrine loops by blocking exocytosis and the secretion of the pro-survival signals will eliminate the signals necessary for endothelial cell maintenance and survival. Moreover, migration of endothelial cells and recruitment of pericytes and endothelial precursors rely on migration factor gradients surrounding endothelial cells. Migratory signals can also be disrupted as the secretion of these factors will be inhibited by exocytotic disruption. As such, unlike current approaches that administer a cocktail of different drugs to resolve this issue of therapeutic resistance based on redundancy, the present specification discloses TVEMPs that provide an alternative approach by providing one molecule that simultaneously targets multiple pathways responsible for the primary and redundant signals necessary for aberrant new blood vessel formation.

[0026] Aspects of the present invention provide, in part, a TVEMP. As used herein, a “TVEMP” means any molecule comprising a targeting domain, a Clostridial toxin translocation domain and a Clostridial toxin enzymatic domain.

[0027] Clostridial toxins are each translated as a single chain polypeptide of approximately 150 kDa that is subsequently cleaved by proteolytic scission within a disulfide loop by a naturally-occurring protease (FIG. 1). This cleavage occurs within the discrete di-chain loop region created between two cysteine residues that form a disulfide bridge. This posttranslational processing yields a di-chain molecule comprising an approximately 50 kDa light chain (LC) and an approximately 100 kDa heavy chain (HC) held together by the single disulfide bond and non-covalent interactions between the two chains. The naturally-occurring protease used to convert the single chain molecule into the di-chain is currently not known. In some serotypes, such as, e.g., BoNT/A, the naturally-occurring protease is produced endogenously by the bacteria serotype and cleavage occurs within the cell before the toxin is release into the environment. However, in other serotypes, such as, e.g., BoNT/E, the bacterial strain appears not to produce an endogenous protease capable of converting the single chain form of the toxin into the di-chain form. In these situations, the toxin is released from the cell as a single-chain toxin which is subsequently converted into the di-chain form by a naturally-occurring protease found in the environment.

[0028] Each mature di-chain molecule comprises three functionally distinct domains: 1) an enzymatic domain located in the LC that includes a metalloprotease region containing a zinc-dependent endopeptidase activity which specifically targets core components of the neurotransmitter release apparatus; 2) a translocation domain contained within the amino-terminal half of the HC(H_{N}) that facilitates release of the LC from intracellular vesicles into the cytoplasm of the target cell; and 3) a binding domain found within the carboxyl-terminal half of the HC(H_{C}) that determines the binding activity and binding specificity of the toxin to the receptor complex located at the surface of the target cell. D. B. Lacy and R. C. Stevens, Sequence Homology and Structural Analysis of the Clostridial Neurotoxins, J. Mol. Biol. 291: 1091-1104 (1999). The H_{C} domain comprises two distinct structural features of roughly equal size, separated by an α-helix, designated the H_{CN} and H_{CC} subdomains. Table 1 gives approximate boundary regions for each domain and subdomain found in exemplary Clostridial toxins.

TABLE 1
Clostridial Toxin Reference Sequences and Regions

| | SEQ ID | | Di-Chain | | H_{C} | | |
|---|---|---|---|---|---|---|---|
| Toxin | NO: | LC | Loop | H_{N} | H_{CN} | α-Linker | H_{CC} |
| BoNT/A | 1 | M1/P2-L429 | C430-C454 | I455-I873 | I874-N1080 | E1081-Q1091 | S1092-L1296 |
| BoNT/B | 6 | M1/P2-M436 | C437-C446 | I447-I860 | L861-S1067 | Q1068-Q1078 | S1079-E1291 |
| BoNT/C1 | 11 | M1/P2-F436 | C437-C453 | R454-I868 | N869-D1081 | G1082-L1092 | Q1093-E1291 |
| BoNT/D | 13 | M1/T2-V436 | C437-C450 | I451-I864 | N865-S1069 | N1069-Q1079 | I1080-E1276 |
| BoNT/E | 15 | M1/P2-F411 | C412-C426 | I427-I847 | K848-D1055 | E1056-E1066 | P1067-K1252 |
| BoNT/F | 18 | M1/P2-F428 | C429-C445 | I446-I865 | K866-D1075 | K1076-E1086 | P1087-E1274 |
| BoNT/G | 21 | M1/P2-M435 | C436-C450 | I451-I865 | S866-N1075 | A1076-Q1086 | S1087-E1297 |
| TeNT | 22 | M1/P2-L438 | C439-C467 | I468-L881 | K882-N1097 | P1098-Y1108 | L1109-D1315 |
| BaNT | 23 | M1/P2-L420 | C421-C435 | I436-I857 | I858-D1064 | K1065-E1075 | P1076-E1268 |
| BuNT | 24 | M1/P2-F411 | C412-C426 | I427-I847 | K848-D1055 | E1056-E1066 | P1067-K1251 |

[0029] The binding, translocation, and enzymatic activity of these three functional domains are all necessary for toxicity. While all details of this process are not yet precisely known, the overall cellular intoxication mechanism whereby Clostridial toxins enter a neuron and inhibit neurotransmitter release is similar, regardless of serotype or subtype. Although the applicants have no wish to be limited by the following description, the intoxication mechanism can be described as comprising at least four steps: 1) receptor binding, 2) complex internalization, 3) light chain translocation, and 4) enzymatic target modification (FIG. 3). The process is initiated when the H_{C} domain of a Clostridial toxin binds to a toxin-specific receptor system located on the plasma membrane surface of a target cell. The binding specificity of a receptor complex is thought to be achieved, in part, by specific combinations of gangliosides and protein receptors that appear to distinctly comprise each Clostridial toxin receptor complex. Once bound, the toxin/receptor complexes are internalized by endocytosis and the internalized vesicles are sorted to specific intracellular routes. The translocation step appears to be triggered by the acidification of the vesicle compartment. This process seems to initiate two important pH-dependent structural rearrangements that increase hydrophobicity and promote formation di-chain form of the toxin. Once activated, light chain endopeptidase of the toxin is released from the intracellular vesicle into the cytosol where it appears to specifically target one of three known core components of the neurotransmitter release apparatus. These core proteins, vesicle-associated membrane protein (VAMP)/synaptobrevin, synaptosomal-associated protein of 25 kDa (SNAP-25) and Syntaxin, are necessary for synaptic vesicle docking and fusion at the nerve terminal and constitute members of the soluble N-ethylmaleimide-sensitive factor-attachment protein-receptor (SNARE) family. BoNT/A and BoNT/E cleave SNAP-25 in the carboxyl-terminal region, releasing a nine or twenty-six amino acid segment, respectively, and BoNT/C1 also cleaves SNAP-25 near the carboxyl-terminus. The botulinum serotypes BoNT/B, BoNT/D, BoNT/F and BoNT/G, and tetanus toxin, act on the conserved central portion of VAMP, and release the amino-terminal portion of VAMP into the cytosol. BoNT/C1 cleaves syntaxin at a single site near the cytosolic membrane surface. The selective proteolysis of synaptic SNAREs accounts for the block of neurotransmitter release caused by Clostridial toxins in vivo. The SNARE protein targets of Clostridial toxins are common to exocytosis in a variety of non-neuronal types; in these cells, as in neurons, light chain peptidase activity inhibits exocytosis, see, e.g., Yann Humeau et al., How Botulinum and Tetanus Neurotoxins Block Neurotransmitter Release, 82(5) Biochimie. 427-446 (2000); Kathryn Turton et al., Botulinum and Tetanus Neurotoxins: Structure, Function and Therapeutic Utility, 27(11) Trends Biochem. Sci. 552-558. (2002); Giovanna Lalli et al., The Journey of Tetanus and Botulinum Neurotoxins in Neurons, 11(9) Trends Microbiol. 431-437, (2003).

[0030] Aspects of the present specification provide, in part, a TVEMP comprising a Clostridial toxin enzymatic domain. As used herein, the term “Clostridial toxin enzymatic domain” refers to any Clostridial toxin polypeptide that can execute the enzymatic target modification step of the intoxication process. Thus, a Clostridial toxin enzymatic domain specifically targets a Clostridial toxin substrate and encompasses the proteolytic cleavage of a Clostridial toxin substrate, such as, e.g., SNARE proteins like a SNAP-25 substrate, a VAMP substrate, and a Syntaxin substrate. Non-limiting examples of a Clostridial toxin enzymatic domain include, e.g., a BoNT/A enzymatic domain, a BoNT/B enzymatic domain, a BoNT/C1 enzymatic domain, a BoNT/D enzymatic domain, a BoNT/E enzymatic domain, a BoNT/F enzymatic domain, a BoNT/G enzymatic domain, a TeNT enzymatic domain, a BaNT enzymatic domain, and a BuNT enzymatic domain.

[0031] A Clostridial toxin enzymatic domain includes, without limitation, naturally occurring Clostridial toxin enzymatic domain variants, such as, e.g., Clostridial toxin enzymatic domain isoforms and Clostridial toxin enzymatic domain subtypes; and non-naturally occurring Clostridial toxin enzymatic domain variants, such as, e.g., conservative Clostridial toxin enzymatic domain variants, non-conservative Clostridial toxin enzymatic domain variants, active Clostridial toxin enzymatic domain fragments thereof, or any combination thereof.

[0032] As used herein, the term “Clostridial toxin enzymatic domain variant,” whether naturally-occurring or non-naturally-occurring, refers to a Clostridial toxin enzymatic domain that has at least one amino acid change from the corresponding region of the disclosed reference sequences (Table 1) and can be described in percent identity to the corresponding region of that reference sequence. Unless expressly indicated, Clostridial toxin enzymatic domain variants useful to practice disclosed embodiments are variants that execute the enzymatic target modification step of the intoxication process. As non-limiting examples, a BoNT/A enzymatic domain variant will have at least one amino acid difference, such as, e.g., an amino acid substitution, deletion or addition, as compared to amino acids ½-429 of SEQ ID NO: 1; a BoNT/B enzymatic domain variant will have at least one amino acid difference, such as, e.g., an amino acid substitution, deletion or addition, as compared to amino acids ½-436 of SEQ ID NO: 6; a BoNT/C1 enzymatic domain variant will have at least one amino acid difference, such as, e.g., an amino acid substitution, deletion or addition, as compared to amino acids ½-436 of SEQ ID NO: 11; a BoNT/D enzymatic domain variant will have at least one amino acid difference, such as, e.g., an amino acid substitution, deletion or addition, as compared to amino acids ½-436 of SEQ ID NO: 13; a BoNT/E enzymatic domain variant will have at least one amino acid difference, such as, e.g., an amino acid substitution, deletion or addition, as compared to amino acids ½-411 of SEQ ID NO: 15; a BoNT/F enzymatic domain variant will have at least one amino acid difference, such as, e.g., an amino acid substitution, deletion or addition, as compared to amino acids ½-428 of SEQ ID NO: 18; a BoNT/G enzymatic domain variant will have at least one amino acid difference, such as, e.g., an amino acid substitution, deletion or addition, as compared to amino acids ½-438 of SEQ ID NO: 21; a TeNT enzymatic domain variant will have at least one amino acid difference, such as, e.g., an amino acid substitution, deletion or addition, as compared to amino acids ½-438 of SEQ ID NO: 22; a BaNT enzymatic domain variant will have at least one amino acid difference, such as, e.g., an amino acid substitution, deletion or addition, as compared to amino acids ½-420 of SEQ ID NO: 23; and a BuNT enzymatic domain variant will have at least one amino acid difference, such as, e.g., an amino acid substitution, deletion or addition, as compared to amino acids ½-411 of SEQ ID NO: 24.

[0033] It is recognized by those of skill in the art that within each serotype of Clostridial toxin there can be naturally occurring Clostridial toxin enzymatic domain variants that differ somewhat in their amino acid sequence, and also in the nucleic acids encoding these proteins. For example, there are presently five BoNT/A subtypes, BoNT/A1, BoNT/A2, BoNT/A3, BoNT/A4, and BoNT/A5, with specific enzymatic domain subtypes showing about 80% to 95% amino acid identity when compared to the BoNT/A enzymatic domain of SEQ ID NO: 1. As used herein, the term “naturally occurring Clostridial toxin enzymatic domain variant” refers to any Clostridial toxin enzymatic domain produced by a naturally-occurring process, including, without limitation, Clostridial toxin enzymatic domain isoforms produced from alternatively-spliced transcripts, Clostridial toxin enzymatic domain isoforms produced by spontaneous mutation and Clostridial toxin enzymatic domain subtypes. A naturally occurring Clostridial toxin enzymatic domain variant can function in substantially the same manner as the reference Clostridial toxin enzymatic domain on which the naturally occurring Clostridial toxin enzymatic domain variant is based, and can be substituted for the reference Clostridial toxin enzymatic domain in any aspect of the present specification.

[0034] A non-limiting examples of a naturally occurring Clostridial toxin enzymatic domain variant is a Clostridial toxin enzymatic domain isoform such as, e.g., a BoNT/A enzymatic domain isoform, a BoNT/B enzymatic domain isoform, a BoNT/C1 enzymatic domain isoform, a BoNT/D enzymatic domain isoform, a BoNT/E enzymatic domain isoform, a BoNT/F enzymatic domain isoform, a BoNT/G enzymatic domain isoform, a TeNT enzymatic domain isoform, a BaNT enzymatic domain isoform, and a BuNT enzymatic domain isoform. Another non-limiting examples of a naturally occurring Clostridial toxin enzymatic domain variant is a Clostridial toxin enzymatic domain subtype such as, e.g., an enzymatic domain from subtype BoNT/A1, BoNT/A2, BoNT/A3, BoNT/A4, or BoNT/A5; an enzymatic domain from subtype BoNT/B1, BoNT/B2, BoNT/Bbv, or BoNT/Bnp; an enzymatic domain from subtype BoNT/C1-1 or BoNT/C1-2; an enzymatic domain from subtype BoNT/E1, BoNT/E2 and BoNT/E3; an enzymatic domain from subtype BoNT/F1, BoNT/F2, or BoNT/F3; and an enzymatic domain from subtype BuNT-1 or BuNT-2.

[0035] As used herein, the term “non-naturally occurring Clostridial toxin enzymatic domain variant” refers to any Clostridial toxin enzymatic domain produced with the aid of human manipulation, including, without limitation, Clostridial toxin enzymatic domains produced by genetic engineering using random mutagenesis or rational design and Clostridial toxin enzymatic domains produced by chemical synthesis. Non-limiting examples of non-naturally occurring Clostridial toxin enzymatic domain variants include, e.g., conservative Clostridial toxin enzymatic domain variants, non-conservative Clostridial toxin enzymatic domain variants, Clostridial toxin enzymatic domain chimeric variants, and active Clostridial toxin enzymatic domain fragments.

[0036] As used herein, the term “conservative Clostridial toxin enzymatic domain variant” refers to a Clostridial toxin enzymatic domain that has at least one amino acid substituted by another amino acid or an amino acid analog that has at least one property similar to that of the original amino acid from the reference Clostridial toxin enzymatic domain sequence (Table 1). Examples of properties include, without limitation, similar size, topography, charge, hydrophobicity, hydrophilicity, lipophilicity, covalent-bonding capacity, hydrogen-bonding capacity, a physicochemical property, of the like, or any combination thereof. A conservative Clostridial toxin enzymatic domain variant can function in substantially the same manner as the reference Clostridial toxin enzymatic domain on which the conservative Clostridial toxin enzymatic domain variant is based, and can be substituted for the reference Clostridial toxin enzymatic domain in any aspect of the present specification. Non-limiting examples of a conservative Clostridial toxin enzymatic domain variant include, e.g., conservative BoNT/A enzymatic domain variants, conservative BoNT/B enzymatic domain variants, conservative BoNT/C1 enzymatic domain variants, conservative BoNT/D enzymatic domain variants, conservative BoNT/E enzymatic domain variants, conservative BoNT/F enzymatic domain variants, conservative BoNT/G enzymatic domain variants, conservative TeNT enzymatic domain variants, conservative BaNT enzymatic domain variants, and conservative BuNT enzymatic domain variants.

[0037] As used herein, the term “non-conservative Clostridial toxin enzymatic domain variant” refers to a Clostridial toxin enzymatic domain in which 1) at least one amino acid is deleted from the reference Clostridial toxin enzymatic domain on which the non-conservative Clostridial toxin enzymatic domain variant is based; 2) at least one amino acid added to the reference Clostridial toxin enzymatic domain on which the non-conservative Clostridial toxin enzymatic domain is based; or 3) at least one amino acid is substituted by another amino acid or an amino acid analog that does not share any property similar to that of the original amino acid from the reference Clostridial toxin enzymatic domain sequence (Table 1). A non-conservative Clostridial toxin enzymatic domain variant can function in substantially the same manner as the reference Clostridial toxin enzymatic domain on which the non-conservative Clostridial toxin enzymatic domain variant is based, and can be substituted for the reference Clostridial toxin enzymatic domain in any aspect of the present specification. Non-limiting examples of a non-conservative Clostridial toxin enzymatic domain variant include, e.g., non-conservative BoNT/A enzymatic domain variants, non-conservative BoNT/B enzymatic domain variants, non-conservative BoNT/C1 enzymatic domain variants, non-conservative BoNT/D enzymatic domain variants, non-conservative BoNT/E enzymatic domain variants, non-conservative BoNT/F enzymatic domain variants, non-conservative BoNT/G enzymatic domain variants, and non-conservative TeNT enzymatic domain variants, non-conservative BaNT enzymatic domain variants, and non-conservative BuNT enzymatic domain variants.

[0038] As used herein, the term “active Clostridial toxin enzymatic domain fragment” refers to any of a variety of Clostridial toxin fragments comprising the enzymatic domain can be useful in aspects of the present specification with the proviso that these enzymatic domain fragments can specifically target the core components of the neurotransmitter release apparatus and thus participate in executing the overall cellular mechanism whereby a Clostridial toxin proteolytically cleaves a substrate. The enzymatic domains of Clostridial toxins are approximately 420-460 amino acids in length and comprise an enzymatic domain (Table 1). Research has shown that the entire length of a Clostridial toxin enzymatic domain is not necessary for the enzymatic activity of the enzymatic domain. As a non-limiting example, the first eight amino acids of the BoNT/A enzymatic domain are not required for enzymatic activity. As another non-limiting example, the first eight amino acids of the TeNT enzymatic domain are not required for enzymatic activity. Likewise, the carboxyl-terminus of the enzymatic domain is not necessary for activity. As a non-limiting example, the last 32 amino acids of the BoNT/A enzymatic domain are not required for enzymatic activity. As another non-limiting example, the last 31 amino acids of the TeNT enzymatic domain are not required for enzymatic activity. Thus, aspects of this embodiment include Clostridial toxin enzymatic domains comprising an enzymatic domain having a length of, e.g., at least 350, 375, 400, 425, or 450 amino acids. Other aspects of this embodiment include Clostridial toxin enzymatic domains comprising an enzymatic domain having a length of, e.g., at most 350, 375, 400, 425, or 450 amino acids.

[0039] Any of a variety of sequence alignment methods can be used to determine percent identity, including, without limitation, global methods, local methods and hybrid methods, such as, e.g., segment approach methods. Protocols to determine percent identity are routine procedures within the scope of one skilled in the art and from the teaching herein.

[0040] Global methods align sequences from the beginning to the end of the molecule and determine the best alignment by adding up scores of individual residue pairs and by imposing gap penalties. Non-limiting methods include, e.g., CLUSTAL W, see, e.g., Julie D. Thompson et al., CLUSTAL W: Improving the Sensitivity of Progressive Multiple Sequence Alignment Through Sequence Weighting, Position-Specific Gap Penalties and Weight Matrix Choice, 22(22) Nucleic Acids Research 4673-4680 (1994); and iterative refinement, see, e.g., Osamu Gotoh, Significant Improvement in Accuracy of Multiple Protein Sequence Alignments by Iterative Refinement as Assessed by Reference to Structural Alignments, 264(4) J. Mol. Biol. 823-838 (1996).

[0041] Local methods align sequences by identifying one or more conserved motifs shared by all of the input sequences. Non-limiting methods include, e.g., Match-box, see, e.g., Eric Depiereux and Ernest Feytmans, Match-Box: A Fundamentally New Algorithm for the Simultaneous Alignment of Several Protein Sequences, 8(5) CABIOS 501-509 (1992); Gibbs sampling, see, e.g., C. E. Lawrence et al., Detecting Subtle Sequence Signals: A Gibbs Sampling Strategy for Multiple Alignment, 262(5131) Science 208-214 (1993); Align-M, see, e.g., Ivo Van Walle et al., Align-M—A New Algorithm for Multiple Alignment of Highly Divergent Sequences, 20(9) Bioinformatics: 1428-1435 (2004).

[0042] Hybrid methods combine functional aspects of both global and local alignment methods. Non-limiting methods include, e.g., segment-to-segment comparison, see, e.g., Burkhard Morgenstern et al., Multiple DNA and Protein Sequence Alignment Based On Segment-To-Segment Comparison, 93(22) Proc. Natl. Acad. Sci. U.S.A. 12098-12103 (1996); T-Coffee, see, e.g., Cedric Notredame et al., T-Coffee: A Novel Algorithm for Multiple Sequence Alignment, 302(1) J. Mol. Biol. 205-217 (2000); MUSCLE, see, e.g., Robert C. Edgar, MUSCLE: Multiple Sequence Alignment With High Score Accuracy and High Throughput, 32(5) Nucleic Acids Res. 1792-1797 (2004); and DIALIGN-T, see, e.g., Amarendran R Subramanian et al., DIALIGN-T: An Improved Algorithm for Segment-Based Multiple Sequence Alignment, 6(1) BMC Bioinformatics 66 (2005).

[0043] The present specification describes various polypeptide variants where one amino acid is substituted for another, such as, e.g., Clostridial toxin enzymatic domain variants, Clostridial toxin translocation domain variants, targeting domain variants, and protease cleavage site variants, A substitution can be assessed by a variety of factors, such as, e.g., the physic properties of the amino acid being substituted (Table 2) or how the original amino acid would tolerate a substitution (Table 3). The selections of which amino acid can be substituted for another amino acid in a polypeptide are known to a person of ordinary skill in the art.

TABLE 2
Amino Acid Properties

| Property | Amino Acids |
|---|---|
| Aliphatic | G, A, I, L, M, P, V |
| Aromatic | F, H, W, Y |
| C-beta branched | I, V, T |
| Hydrophobic | C, F, I, L, M, V, W |
| Small polar | D, N, P |
| Small non-polar | A, C, G, S, T |
| Large polar | E, H, K, Q, R, W, Y |
| Large non-polar | F, I, L, M, V |
| Charged | D, E, H, K, R |
| Uncharged | C, S, T |
| Negative | D, E |
| Positive | H, K, R |
| Acidic | D, E |
| Basic | K, R |
| Amide | N, Q |

TABLE 3
Amino Acid Substitutions

| Amino | Favored | | |
|---|---|---|---|
| Acid | Substitution | Neutral Substitutions | Disfavored substitution |
| A | G, S, T | C, E, I, K, M, L, P, Q, R, V | D, F, H, N, Y, W |
| C | F, S, Y, W | A, H, I, M, L, T, V | D, E, G, K, N, P, Q, R |
| D | E, N | G, H, K, P, Q, R, S, T | A, C, I, L, |
| E | D, K, Q | A, H, N, P, R, S, T | C, F, G, I, L, M, V, W, Y |
| F | M, L, W, Y | C, I, V | A, D, E, G, H, K, N, P, Q, R, S, T |
| G | A, S | D, K, N, P, Q, R | C, E, F, H, I, L, M, T, V, W, Y |
| H | N, Y | C, D, E, K, Q, R, S, T, W | A, F, G, I, L, M, P, V |
| I | V, L, M | A, C, T, F, Y | D, E, G, H, K, N, P, Q, R, S, W |
| K | Q, E, R | A, D, G, H, M, N, P, S, T | C, F, I, L, V, W, Y |
| L | F, I, M, V | A, C, W, Y | D, E, G, H, K, N, P, Q, R, S, T |
| M | F, I, L, V | A, C, R, Q, K, T, W, Y | D, E, G, H, N, P, S |
| N | D, H, S | E, G, K, Q, R, T | A, C, F, I, L, M, P, V, W, Y |
| P | — | A, D, E, G, K, Q, R, S, T | C, F, H, I, L, M, N, V, W, Y |
| Q | E, K, R | A, D, G, H, M, N, P, S, T | C, F, I, L, V, W, Y |
| R | K, Q | A, D, E, G, H, M, N, P, S, T | C, F, I, L, V, W, Y |
| S | A, N, T | C, D, E, G, H, K, P, Q, R, T | F, I, L, M, V, W, Y |
| T | S | A, C, D, E, H, I, K, M, N, P, | F, G, L, W, Y |
| | | Q, R, V | |
| V | I, L, M | A, C, F, T, Y | D, E, G, H, K, N, P, Q, R, S, W |
| W | F, Y | H, L, M | A, C, D, E, G, I, K, N, P, Q, R, S, |
| | | | T, V |
| Y | F, H, W | C, I, L, M, V | A, D, E, G, K, N, P, Q, R, S, T |

Matthew J. Betts and Robert, B. Russell, Amino Acid Properties and Consequences of Substitutions, pp. 289-316, In Bioinformatics for Geneticists, (eds Michael R. Barnes, Ian C. Gray, Wiley, 2003).

[0044] Thus, in an embodiment, a TVEMP disclosed herein comprises a Clostridial toxin enzymatic domain. In an aspect of this embodiment, a Clostridial toxin enzymatic domain comprises a naturally occurring Clostridial toxin enzymatic domain variant, such as, e.g., a Clostridial toxin enzymatic domain isoform or a Clostridial toxin enzymatic domain subtype. In another aspect of this embodiment, a Clostridial toxin enzymatic domain comprises a non-naturally occurring Clostridial toxin enzymatic domain variant, such as, e.g., a conservative Clostridial toxin enzymatic domain variant, a non-conservative Clostridial toxin enzymatic domain variant, an active Clostridial toxin enzymatic domain fragment, or any combination thereof.

[0045] In another embodiment, a hydrophic amino acid at one particular position in the polypeptide chain of the Clostridial toxin enzymatic domain can be substituted with another hydrophic amino acid. Examples of hydrophic amino acids include, e.g., C, F, I, L, M, V and W. In another aspect of this embodiment, an aliphatic amino acid at one particular position in the polypeptide chain of the Clostridial toxin enzymatic domain can be substituted with another aliphatic amino acid. Examples of aliphatic amino acids include, e.g., A, I, L, P, and V. In yet another aspect of this embodiment, an aromatic amino acid at one particular position in the polypeptide chain of the Clostridial toxin enzymatic domain can be substituted with another aromatic amino acid. Examples of aromatic amino acids include, e.g., F, H, W and Y. In still another aspect of this embodiment, a stacking amino acid at one particular position in the polypeptide chain of the Clostridial toxin enzymatic domain can be substituted with another stacking amino acid. Examples of stacking amino acids include, e.g., F, H, W and Y. In a further aspect of this embodiment, a polar amino acid at one particular position in the polypeptide chain of the Clostridial toxin enzymatic domain can be substituted with another polar amino acid. Examples of polar amino acids include, e.g., D, E, K, N, Q, and R. In a further aspect of this embodiment, a less polar or indifferent amino acid at one particular position in the polypeptide chain of the Clostridial toxin enzymatic domain can be substituted with another less polar or indifferent amino acid. Examples of less polar or indifferent amino acids include, e.g., A, H, G, P, S, T, and Y. In a yet further aspect of this embodiment, a positive charged amino acid at one particular position in the polypeptide chain of the Clostridial toxin enzymatic domain can be substituted with another positive charged amino acid. Examples of positive charged amino acids include, e.g., K, R, and H. In a still further aspect of this embodiment, a negative charged amino acid at one particular position in the polypeptide chain of the Clostridial toxin enzymatic domain can be substituted with another negative charged amino acid. Examples of negative charged amino acids include, e.g., D and E. In another aspect of this embodiment, a small amino acid at one particular position in the polypeptide chain of the Clostridial toxin enzymatic domain can be substituted with another small amino acid. Examples of small amino acids include, e.g., A, D, G, N, P, S, and T. In yet another aspect of this embodiment, a C-beta branching amino acid at one particular position in the polypeptide chain of the Clostridial toxin enzymatic domain can be substituted with another C-beta branching amino acid. Examples of C-beta branching amino acids include, e.g., I, T and V.

[0046] In another embodiment, a Clostridial toxin enzymatic domain comprises a BoNT/A enzymatic domain. In an aspect of this embodiment, a BoNT/A enzymatic domain comprises the enzymatic domains of SEQ ID NO: 1, SEQ ID NO: 2, SEQ ID NO: 3, SEQ ID NO: 4, or SEQ ID NO: 5. In other aspects of this embodiment, a BoNT/A enzymatic domain comprises amino acids ½-429 of SEQ ID NO: 1. In another aspect of this embodiment, a BoNT/A enzymatic domain comprises a naturally occurring BoNT/A enzymatic domain variant, such as, e.g., an enzymatic domain from a BoNT/A isoform or an enzymatic domain from a BoNT/A subtype. In another aspect of this embodiment, a BoNT/A enzymatic domain comprises a naturally occurring BoNT/A enzymatic domain variant of SEQ ID NO: 1, SEQ ID NO: 2, SEQ ID NO: 3, SEQ ID NO: 4, or SEQ ID NO: 5, such as, e.g., a BoNT/A isoform enzymatic domain or a BoNT/A subtype enzymatic domain. In another aspect of this embodiment, a BoNT/A enzymatic domain comprises amino acids ½-429 of a naturally occurring BoNT/A enzymatic domain variant of SEQ ID NO: 1, such as, e.g., a BoNT/A isoform enzymatic domain or a BoNT/A subtype enzymatic domain. In still another aspect of this embodiment, a BoNT/A enzymatic domain comprises a non-naturally occurring BoNT/A enzymatic domain variant, such as, e.g., a conservative BoNT/A enzymatic domain variant, a non-conservative BoNT/A enzymatic domain variant, an active BoNT/A enzymatic domain fragment, or any combination thereof. In still another aspect of this embodiment, a BoNT/A enzymatic domain comprises the enzymatic domain of a non-naturally occurring BoNT/A enzymatic domain variant of SEQ ID NO: 1, SEQ ID NO: 2, SEQ ID NO: 3, SEQ ID NO: 4, or SEQ ID NO: 5, such as, e.g., a conservative BoNT/A enzymatic domain variant, a non-conservative BoNT/A enzymatic domain variant, an active BoNT/A enzymatic domain fragment, or any combination thereof. In still another aspect of this embodiment, a BoNT/A enzymatic domain comprises amino acids ½-429 of a non-naturally occurring BoNT/A enzymatic domain variant of SEQ ID NO: 1, such as, e.g., a conservative BoNT/A enzymatic domain variant, a non-conservative BoNT/A enzymatic domain variant, an active BoNT/A enzymatic domain fragment, or any combination thereof.

[0047] In other aspects of this embodiment, a BoNT/A enzymatic domain comprises a polypeptide having an amino acid identity of, e.g., at least 70%, at least 75%, at least 80%, at least 85%, at least 90%, or at least 95% to the enzymatic domain of SEQ ID NO: 1, SEQ ID NO: 2, SEQ ID NO: 3, SEQ ID NO: 4, or SEQ ID NO: 5; or at most 70%, at most 75%, at most 80%, at most 85%, at most 90%, or at most 95% to the enzymatic domain of SEQ ID NO: 1, SEQ ID NO: 2, SEQ ID NO: 3, SEQ ID NO: 4, or SEQ ID NO: 5. In yet other aspects of this embodiment, a BoNT/A enzymatic domain comprises a polypeptide having an amino acid identity of, e.g., at least 70%, at least 75%, at least 80%, at least 85%, at least 90%, or at least 95% to amino acids ½-429 of SEQ ID NO: 1; or at most 70%, at most 75%, at most 80%, at most 85%, at most 90%, or at most 95% to amino acids ½-429 of SEQ ID NO: 1.

[0048] In other aspects of this embodiment, a BoNT/A enzymatic domain comprises a polypeptide having, e.g., at most 1, 2, 3, 4, 5, 6, 7, 8, 9, 10, 20, 30, 40, 50, or 100 non-contiguous amino acid deletions, additions, and/or substitutions relative to the enzymatic domain of SEQ ID NO: 1, SEQ ID NO: 2, SEQ ID NO: 3, SEQ ID NO: 4, or SEQ ID NO: 5; or at most 1, 2, 3, 4, 5, 6, 7, 8, 9, 10, 20, 30, 40, 50, or 100 non-contiguous amino acid deletions, additions, and/or substitutions relative to the enzymatic domain of SEQ ID NO: 1, SEQ ID NO: 2, SEQ ID NO: 3, SEQ ID NO: 4, or SEQ ID NO: 5. In yet other aspects of this embodiment, a BoNT/A enzymatic domain comprises a polypeptide having, e.g., at most 1, 2, 3, 4, 5, 6, 7, 8, 9, 10, 20, 30, 40, 50, or 100 non-contiguous amino acid deletions, additions, and/or substitutions relative to amino acids ½-429 of SEQ ID NO: 1; or at most 1, 2, 3, 4, 5, 6, 7, 8, 9, 10, 20, 30, 40, 50, or 100 non-contiguous amino acid deletions, additions, and/or substitutions relative to amino acids ½-429 of SEQ ID NO: 1. In still other aspects of this embodiment, a BoNT/A enzymatic domain comprises a polypeptide having, e.g., at least 1, 2, 3, 4, 5, 6, 7, 8, 9, 10, 20, 30, 40, 50, or 100 contiguous amino acid deletions, additions, and/or substitutions relative to the enzymatic domain of SEQ ID NO: 1, SEQ ID NO: 2, SEQ ID NO: 3, SEQ ID NO: 4, or SEQ ID NO: 5; or at most 1, 2, 3, 4, 5, 6, 7, 8, 9, 10, 20, 30, 40, 50, or 100 contiguous amino acid deletions, additions, and/or substitutions relative to the enzymatic domain of SEQ ID NO: 1, SEQ ID NO: 2, SEQ ID NO: 3, SEQ ID NO: 4, or SEQ ID NO: 5. In further other aspects of this embodiment, a BoNT/A enzymatic domain comprises a polypeptide having, e.g., at least 1, 2, 3, 4, 5, 6, 7, 8, 9, 10, 20, 30, 40, 50, or 100 contiguous amino acid deletions, additions, and/or substitutions relative to amino acids ½-429 of SEQ ID NO: 1; or at most 1, 2, 3, 4, 5, 6, 7, 8, 9, 10, 20, 30, 40, 50, or 100 contiguous amino acid deletions, additions, and/or substitutions relative to amino acids ½-429 of SEQ ID NO: 1.

[0049] In another embodiment, a Clostridial toxin enzymatic domain comprises a BoNT/B enzymatic domain. In an aspect of this embodiment, a BoNT/B enzymatic domain comprises the enzymatic domains of SEQ ID NO: 6, SEQ ID NO: 7, SEQ ID NO: 8, SEQ ID NO: 9, or SEQ ID NO: 10. In other aspects of this embodiment, a BoNT/B enzymatic domain comprises amino acids ½-436 of SEQ ID NO: 6. In another aspect of this embodiment, a BoNT/B enzymatic domain comprises a naturally occurring BoNT/B enzymatic domain variant, such as, e.g., an enzymatic domain from a BoNT/B isoform or an enzymatic domain from a BoNT/B subtype. In another aspect of this embodiment, a BoNT/B enzymatic domain comprises a naturally occurring BoNT/B enzymatic domain variant of SEQ ID NO: 6, SEQ ID NO: 7, SEQ ID NO: 8, SEQ ID NO: 9, or SEQ ID NO: 10, such as, e.g., a BoNT/B isoform enzymatic domain or a BoNT/B subtype enzymatic domain. In another aspect of this embodiment, a BoNT/B enzymatic domain comprises amino acids ½-436 of a naturally occurring BoNT/B enzymatic domain variant of SEQ ID NO: 6, such as, e.g., a BoNT/B isoform enzymatic domain or a BoNT/B subtype enzymatic domain. In still another aspect of this embodiment, a BoNT/B enzymatic domain comprises a non-naturally occurring BoNT/B enzymatic domain variant, such as, e.g., a conservative BoNT/B enzymatic domain variant, a non-conservative BoNT/B enzymatic domain variant, an active BoNT/B enzymatic domain fragment, or any combination thereof. In still another aspect of this embodiment, a BoNT/B enzymatic domain comprises the enzymatic domain of a non-naturally occurring BoNT/B enzymatic domain variant of SEQ ID NO: 6, SEQ ID NO: 7, SEQ ID NO: 8, SEQ ID NO: 9, or SEQ ID NO: 10, such as, e.g., a conservative BoNT/B enzymatic domain variant, a non-conservative BoNT/B enzymatic domain variant, an active BoNT/B enzymatic domain fragment, or any combination thereof. In still another aspect of this embodiment, a BoNT/B enzymatic domain comprises amino acids ½-436 of a non-naturally occurring BoNT/B enzymatic domain variant of SEQ ID NO: 6, such as, e.g., a conservative BoNT/B enzymatic domain variant, a non-conservative BoNT/B enzymatic domain variant, an active BoNT/B enzymatic domain fragment, or any combination thereof.

[0050] In other aspects of this embodiment, a BoNT/B enzymatic domain comprises a polypeptide having an amino acid identity of, e.g., at least 70%, at least 75%, at least 80%, at least 85%, at least 90%, or at least 95% to the enzymatic domain of SEQ ID NO: 6, SEQ ID NO: 7, SEQ ID NO: 8, SEQ ID NO: 9, or SEQ ID NO: 10; or at most 70%, at most 75%, at most 80%, at most 85%, at most 90%, or at most 95% to the enzymatic domain of SEQ ID NO: 6, SEQ ID NO: 7, SEQ ID NO: 8, SEQ ID NO: 9, or SEQ ID NO: 10. In yet other aspects of this embodiment, a BoNT/B enzymatic domain comprises a polypeptide having an amino acid identity of, e.g., at least 70%, at least 75%, at least 80%, at least 85%, at least 90%, or at least 95% to amino acids ½-436 of SEQ ID NO: 6; or at most 70%, at most 75%, at most 80%, at most 85%, at most 90%, or at most 95% to amino acids ½-436 of SEQ ID NO: 6.

[0051] In other aspects of this embodiment, a BoNT/B enzymatic domain comprises a polypeptide having, e.g., at most 1, 2, 3, 4, 5, 6, 7, 8, 9, 10, 20, 30, 40, 50, or 100 non-contiguous amino acid deletions, additions, and/or substitutions relative to the enzymatic domain of SEQ ID NO: 6, SEQ ID NO: 7, SEQ ID NO: 8, SEQ ID NO: 9, or SEQ ID NO: 10; or at most 1, 2, 3, 4, 5, 6, 7, 8, 9, 10, 20, 30, 40, 50, or 100 non-contiguous amino acid deletions, additions, and/or substitutions relative to the enzymatic domain of SEQ ID NO: 6, SEQ ID NO: 7, SEQ ID NO: 8, SEQ ID NO: 9, or SEQ ID NO: 10. In yet other aspects of this embodiment, a BoNT/B enzymatic domain comprises a polypeptide having, e.g., at most 1, 2, 3, 4, 5, 6, 7, 8, 9, 10, 20, 30, 40, 50, or 100 non-contiguous amino acid deletions, additions, and/or substitutions relative to amino acids ½-436 of SEQ ID NO: 6; or at most 1, 2, 3, 4, 5, 6, 7, 8, 9, 10, 20, 30, 40, 50, or 100 non-contiguous amino acid deletions, additions, and/or substitutions relative to amino acids ½-436 of SEQ ID NO: 6. In still other aspects of this embodiment, a BoNT/B enzymatic domain comprises a polypeptide having, e.g., at least 1, 2, 3, 4, 5, 6, 7, 8, 9, 10, 20, 30, 40, 50, or 100 contiguous amino acid deletions, additions, and/or substitutions relative to the enzymatic domain of SEQ ID NO: 6, SEQ ID NO: 7, SEQ ID NO: 8, SEQ ID NO: 9, or SEQ ID NO: 10; or at most 1, 2, 3, 4, 5, 6, 7, 8, 9, 10, 20, 30, 40, 50, or 100 contiguous amino acid deletions, additions, and/or substitutions relative to the enzymatic domain of SEQ ID NO: 6, SEQ ID NO: 7, SEQ ID NO: 8, SEQ ID NO: 9, or SEQ ID NO: 10. In further other aspects of this embodiment, a BoNT/B enzymatic domain comprises a polypeptide having, e.g., at least 1, 2, 3, 4, 5, 6, 7, 8, 9, 10, 20, 30, 40, 50, or 100 contiguous amino acid deletions, additions, and/or substitutions relative to amino acids ½-436 of SEQ ID NO: 6; or at most 1, 2, 3, 4, 5, 6, 7, 8, 9, 10, 20, 30, 40, 50, or 100 contiguous amino acid deletions, additions, and/or substitutions relative to amino acids ½-436 of SEQ ID NO: 6.

[0052] In another embodiment, a Clostridial toxin enzymatic domain comprises a BoNT/C1 enzymatic domain. In an aspect of this embodiment, a BoNT/C1 enzymatic domain comprises the enzymatic domains of SEQ ID NO: 11 or SEQ ID NO: 12. In other aspects of this embodiment, a BoNT/C1 enzymatic domain comprises amino acids ½-436 of SEQ ID NO: 11. In another aspect of this embodiment, a BoNT/C1 enzymatic domain comprises a naturally occurring BoNT/C1 enzymatic domain variant, such as, e.g., an enzymatic domain from a BoNT/C1 isoform or an enzymatic domain from a BoNT/C1 subtype. In another aspect of this embodiment, a BoNT/C1 enzymatic domain comprises a naturally occurring BoNT/C1 enzymatic domain variant of SEQ ID NO: 11 or SEQ ID NO: 12, such as, e.g., a BoNT/C1 isoform enzymatic domain or a BoNT/C1 subtype enzymatic domain. In another aspect of this embodiment, a BoNT/C1 enzymatic domain comprises amino acids ½-436 of a naturally occurring BoNT/C1 enzymatic domain variant of SEQ ID NO: 11, such as, e.g., a BoNT/C1 isoform enzymatic domain or a BoNT/C1 subtype enzymatic domain. In still another aspect of this embodiment, a BoNT/C1 enzymatic domain comprises a non-naturally occurring BoNT/C1 enzymatic domain variant, such as, e.g., a conservative BoNT/C1 enzymatic domain variant, a non-conservative BoNT/C1 enzymatic domain variant, an active BoNT/C1 enzymatic domain fragment, or any combination thereof. In still another aspect of this embodiment, a BoNT/C1 enzymatic domain comprises the enzymatic domain of a non-naturally occurring BoNT/C1 enzymatic domain variant of SEQ ID NO: 11 or SEQ ID NO: 12, such as, e.g., a conservative BoNT/C1 enzymatic domain variant, a non-conservative BoNT/C1 enzymatic domain variant, an active BoNT/C1 enzymatic domain fragment, or any combination thereof. In still another aspect of this embodiment, a BoNT/C1 enzymatic domain comprises amino acids ½-436 of a non-naturally occurring BoNT/C1 enzymatic domain variant of SEQ ID NO: 11, such as, e.g., a conservative BoNT/C1 enzymatic domain variant, a non-conservative BoNT/C1 enzymatic domain variant, an active BoNT/C1 enzymatic domain fragment, or any combination thereof.

[0053] In other aspects of this embodiment, a BoNT/C1 enzymatic domain comprises a polypeptide having an amino acid identity of, e.g., at least 70%, at least 75%, at least 80%, at least 85%, at least 90%, or at least 95% to the enzymatic domain of SEQ ID NO: 11 or SEQ ID NO: 12; or at most 70%, at most 75%, at most 80%, at most 85%, at most 90%, or at most 95% to the enzymatic domain of SEQ ID NO: 11 or SEQ ID NO: 12. In yet other aspects of this embodiment, a BoNT/C1 enzymatic domain comprises a polypeptide having an amino acid identity of, e.g., at least 70%, at least 75%, at least 80%, at least 85%, at least 90%, or at least 95% to amino acids ½-436 of SEQ ID NO: 11; or at most 70%, at most 75%, at most 80%, at most 85%, at most 90%, or at most 95% to amino acids ½-436 of SEQ ID NO: 11.

[0054] In other aspects of this embodiment, a BoNT/C1 enzymatic domain comprises a polypeptide having, e.g., at most 1, 2, 3, 4, 5, 6, 7, 8, 9, 10, 20, 30, 40, 50, or 100 non-contiguous amino acid deletions, additions, and/or substitutions relative to the enzymatic domain of SEQ ID NO: 11 or SEQ ID NO: 12; or at most 1, 2, 3, 4, 5, 6, 7, 8, 9, 10, 20, 30, 40, 50, or 100 non-contiguous amino acid deletions, additions, and/or substitutions relative to the enzymatic domain of SEQ ID NO: 11 or SEQ ID NO: 12. In yet other aspects of this embodiment, a BoNT/C1 enzymatic domain comprises a polypeptide having, e.g., at most 1, 2, 3, 4, 5, 6, 7, 8, 9, 10, 20, 30, 40, 50, or 100 non-contiguous amino acid deletions, additions, and/or substitutions relative to amino acids ½-436 of SEQ ID NO: 11; or at most 1, 2, 3, 4, 5, 6, 7, 8, 9, 10, 20, 30, 40, 50, or 100 non-contiguous amino acid deletions, additions, and/or substitutions relative to amino acids ½-436 of SEQ ID NO: 11. In still other aspects of this embodiment, a BoNT/C1 enzymatic domain comprises a polypeptide having, e.g., at least 1, 2, 3, 4, 5, 6, 7, 8, 9, 10, 20, 30, 40, 50, or 100 contiguous amino acid deletions, additions, and/or substitutions relative to the enzymatic domain of SEQ ID NO: 11 or SEQ ID NO: 12; or at most 1, 2, 3, 4, 5, 6, 7, 8, 9, 10, 20, 30, 40, 50, or 100 contiguous amino acid deletions, additions, and/or substitutions relative to the enzymatic domain of SEQ ID NO: 11 or SEQ ID NO: 12. In further other aspects of this embodiment, a BoNT/C1 enzymatic domain comprises a polypeptide having, e.g., at least 1, 2, 3, 4, 5, 6, 7, 8, 9, 10, 20, 30, 40, 50, or 100 contiguous amino acid deletions, additions, and/or substitutions relative to amino acids ½-436 of SEQ ID NO: 11; or at most 1, 2, 3, 4, 5, 6, 7, 8, 9, 10, 20, 30, 40, 50, or 100 contiguous amino acid deletions, additions, and/or substitutions relative to amino acids ½-436 of SEQ ID NO: 11.

[0055] In another embodiment, a Clostridial toxin enzymatic domain comprises a BoNT/D enzymatic domain. In an aspect of this embodiment, a BoNT/D enzymatic domain comprises the enzymatic domains of SEQ ID NO: 13 or SEQ ID NO: 14. In other aspects of this embodiment, a BoNT/D enzymatic domain comprises amino acids ½-436 of SEQ ID NO: 13. In another aspect of this embodiment, a BoNT/D enzymatic domain comprises a naturally occurring BoNT/D enzymatic domain variant, such as, e.g., an enzymatic domain from a BoNT/D isoform or an enzymatic domain from a BoNT/D subtype. In another aspect of this embodiment, a BoNT/D enzymatic domain comprises a naturally occurring BoNT/D enzymatic domain variant of SEQ ID NO: 13 or SEQ ID NO: 14, such as, e.g., a BoNT/D isoform enzymatic domain or a BoNT/D subtype enzymatic domain. In another aspect of this embodiment, a BoNT/D enzymatic domain comprises amino acids ½-436 of a naturally occurring BoNT/D enzymatic domain variant of SEQ ID NO: 13, such as, e.g., a BoNT/D isoform enzymatic domain or a BoNT/D subtype enzymatic domain. In still another aspect of this embodiment, a BoNT/D enzymatic domain comprises a non-naturally occurring BoNT/D enzymatic domain variant, such as, e.g., a conservative BoNT/D enzymatic domain variant, a non-conservative BoNT/D enzymatic domain variant, an active BoNT/D enzymatic domain fragment, or any combination thereof. In still another aspect of this embodiment, a BoNT/D enzymatic domain comprises the enzymatic domain of a non-naturally occurring BoNT/D enzymatic domain variant of SEQ ID NO: 13 or SEQ ID NO: 14, such as, e.g., a conservative BoNT/D enzymatic domain variant, a non-conservative BoNT/D enzymatic domain variant, an active BoNT/D enzymatic domain fragment, or any combination thereof. In still another aspect of this embodiment, a BoNT/D enzymatic domain comprises amino acids ½-436 of a non-naturally occurring BoNT/D enzymatic domain variant of SEQ ID NO: 13, such as, e.g., a conservative BoNT/D enzymatic domain variant, a non-conservative BoNT/D enzymatic domain variant, an active BoNT/D enzymatic domain fragment, or any combination thereof.

[0056] In other aspects of this embodiment, a BoNT/D enzymatic domain comprises a polypeptide having an amino acid identity of, e.g., at least 70%, at least 75%, at least 80%, at least 85%, at least 90%, or at least 95% to the enzymatic domain of SEQ ID NO: 13 or SEQ ID NO: 14; or at most 70%, at most 75%, at most 80%, at most 85%, at most 90%, or at most 95% to the enzymatic domain of SEQ ID NO: 13 or SEQ ID NO: 14. In yet other aspects of this embodiment, a BoNT/D enzymatic domain comprises a polypeptide having an amino acid identity of, e.g., at least 70%, at least 75%, at least 80%, at least 85%, at least 90%, or at least 95% to amino acids ½-436 of SEQ ID NO: 13; or at most 70%, at most 75%, at most 80%, at most 85%, at most 90%, or at most 95% to amino acids ½-436 of SEQ ID NO: 13.

[0057] In other aspects of this embodiment, a BoNT/D enzymatic domain comprises a polypeptide having, e.g., at most 1, 2, 3, 4, 5, 6, 7, 8, 9, 10, 20, 30, 40, 50, or 100 non-contiguous amino acid deletions, additions, and/or substitutions relative to the enzymatic domain of SEQ ID NO: 13 or SEQ ID NO: 14; or at most 1, 2, 3, 4, 5, 6, 7, 8, 9, 10, 20, 30, 40, 50, or 100 non-contiguous amino acid deletions, additions, and/or substitutions relative to the enzymatic domain of SEQ ID NO: 13 or SEQ ID NO: 14. In yet other aspects of this embodiment, a BoNT/D enzymatic domain comprises a polypeptide having, e.g., at most 1, 2, 3, 4, 5, 6, 7, 8, 9, 10, 20, 30, 40, 50, or 100 non-contiguous amino acid deletions, additions, and/or substitutions relative to amino acids ½-436 of SEQ ID NO: 13; or at most 1, 2, 3, 4, 5, 6, 7, 8, 9, 10, 20, 30, 40, 50, or 100 non-contiguous amino acid deletions, additions, and/or substitutions relative to amino acids ½-436 of SEQ ID NO: 13. In still other aspects of this embodiment, a BoNT/D enzymatic domain comprises a polypeptide having, e.g., at least 1, 2, 3, 4, 5, 6, 7, 8, 9, 10, 20, 30, 40, 50, or 100 contiguous amino acid deletions, additions, and/or substitutions relative to the enzymatic domain of SEQ ID NO: 13 or SEQ ID NO: 14; or at most 1, 2, 3, 4, 5, 6, 7, 8, 9, 10, 20, 30, 40, 50, or 100 contiguous amino acid deletions, additions, and/or substitutions relative to the enzymatic domain of SEQ ID NO: 13 or SEQ ID NO: 14. In further other aspects of this embodiment, a BoNT/D enzymatic domain comprises a polypeptide having, e.g., at least 1, 2, 3, 4, 5, 6, 7, 8, 9, 10, 20, 30, 40, 50, or 100 contiguous amino acid deletions, additions, and/or substitutions relative to amino acids ½-436 of SEQ ID NO: 13; or at most 1, 2, 3, 4, 5, 6, 7, 8, 9, 10, 20, 30, 40, 50, or 100 contiguous amino acid deletions, additions, and/or substitutions relative to amino acids ½-436 of SEQ ID NO: 13.

[0058] In another embodiment, a Clostridial toxin enzymatic domain comprises a BoNT/E enzymatic domain. In an aspect of this embodiment, a BoNT/E enzymatic domain comprises the enzymatic domains of SEQ ID NO: 15, SEQ ID NO: 16, or SEQ ID NO: 17. In other aspects of this embodiment, a BoNT/E enzymatic domain comprises amino acids ½-411 of SEQ ID NO: 15. In another aspect of this embodiment, a BoNT/E enzymatic domain comprises a naturally occurring BoNT/E enzymatic domain variant, such as, e.g., an enzymatic domain from a BoNT/E isoform or an enzymatic domain from a BoNT/E subtype. In another aspect of this embodiment, a BoNT/E enzymatic domain comprises a naturally occurring BoNT/E enzymatic domain variant of SEQ ID NO: 15, SEQ ID NO: 16, or SEQ ID NO: 17, such as, e.g., a BoNT/E isoform enzymatic domain or a BoNT/E subtype enzymatic domain. In another aspect of this embodiment, a BoNT/E enzymatic domain comprises amino acids ½-411 of a naturally occurring BoNT/E enzymatic domain variant of SEQ ID NO: 15, such as, e.g., a BoNT/E isoform enzymatic domain or a BoNT/E subtype enzymatic domain. In still another aspect of this embodiment, a BoNT/E enzymatic domain comprises a non-naturally occurring BoNT/E enzymatic domain variant, such as, e.g., a conservative BoNT/E enzymatic domain variant, a non-conservative BoNT/E enzymatic domain variant, an active BoNT/E enzymatic domain fragment, or any combination thereof. In still another aspect of this embodiment, a BoNT/E enzymatic domain comprises the enzymatic domain of a non-naturally occurring BoNT/E enzymatic domain variant of SEQ ID NO: 15, SEQ ID NO: 16, or SEQ ID NO: 17, such as, e.g., a conservative BoNT/E enzymatic domain variant, a non-conservative BoNT/E enzymatic domain variant, an active BoNT/E enzymatic domain fragment, or any combination thereof. In still another aspect of this embodiment, a BoNT/E enzymatic domain comprises amino acids ½-411 of a non-naturally occurring BoNT/E enzymatic domain variant of SEQ ID NO: 15, such as, e.g., a conservative BoNT/E enzymatic domain variant, a non-conservative BoNT/E enzymatic domain variant, an active BoNT/E enzymatic domain fragment, or any combination thereof.

[0059] In other aspects of this embodiment, a BoNT/E enzymatic domain comprises a polypeptide having an amino acid identity of, e.g., at least 70%, at least 75%, at least 80%, at least 85%, at least 90%, or at least 95% to the enzymatic domain of SEQ ID NO: 15, SEQ ID NO: 16, or SEQ ID NO: 17; or at most 70%, at most 75%, at most 80%, at most 85%, at most 90%, or at most 95% to the enzymatic domain of SEQ ID NO: 15, SEQ ID NO: 16, or SEQ ID NO: 17. In yet other aspects of this embodiment, a BoNT/E enzymatic domain comprises a polypeptide having an amino acid identity of, e.g., at least 70%, at least 75%, at least 80%, at least 85%, at least 90%, or at least 95% to amino acids ½-411 of SEQ ID NO: 15; or at most 70%, at most 75%, at most 80%, at most 85%, at most 90%, or at most 95% to amino acids ½-411 of SEQ ID NO: 15.

[0060] In other aspects of this embodiment, a BoNT/E enzymatic domain comprises a polypeptide having, e.g., at most 1, 2, 3, 4, 5, 6, 7, 8, 9, 10, 20, 30, 40, 50, or 100 non-contiguous amino acid deletions, additions, and/or substitutions relative to the enzymatic domain of SEQ ID NO: 15, SEQ ID NO: 16, or SEQ ID NO: 17; or at most 1, 2, 3, 4, 5, 6, 7, 8, 9, 10, 20, 30, 40, 50, or 100 non-contiguous amino acid deletions, additions, and/or substitutions relative to the enzymatic domain of SEQ ID NO: 15, SEQ ID NO: 16, or SEQ ID NO: 17. In yet other aspects of this embodiment, a BoNT/E enzymatic domain comprises a polypeptide having, e.g., at most 1, 2, 3, 4, 5, 6, 7, 8, 9, 10, 20, 30, 40, 50, or 100 non-contiguous amino acid deletions, additions, and/or substitutions relative to amino acids ½-411 of SEQ ID NO: 15; or at most 1, 2, 3, 4, 5, 6, 7, 8, 9, 10, 20, 30, 40, 50, or 100 non-contiguous amino acid deletions, additions, and/or substitutions relative to amino acids ½-411 of SEQ ID NO: 15. In still other aspects of this embodiment, a BoNT/E enzymatic domain comprises a polypeptide having, e.g., at least 1, 2, 3, 4, 5, 6, 7, 8, 9, 10, 20, 30, 40, 50, or 100 contiguous amino acid deletions, additions, and/or substitutions relative to the enzymatic domain of SEQ ID NO: 15, SEQ ID NO: 16, or SEQ ID NO: 17; or at most 1, 2, 3, 4, 5, 6, 7, 8, 9, 10, 20, 30, 40, 50, or 100 contiguous amino acid deletions, additions, and/or substitutions relative to the enzymatic domain of SEQ ID NO: 15, SEQ ID NO: 16, or SEQ ID NO: 17. In further other aspects of this embodiment, a BoNT/E enzymatic domain comprises a polypeptide having, e.g., at least 1, 2, 3, 4, 5, 6, 7, 8, 9, 10, 20, 30, 40, 50, or 100 contiguous amino acid deletions, additions, and/or substitutions relative to amino acids ½-411 of SEQ ID NO: 15; or at most 1, 2, 3, 4, 5, 6, 7, 8, 9, 10, 20, 30, 40, 50, or 100 contiguous amino acid deletions, additions, and/or substitutions relative to amino acids ½-411 of SEQ ID NO: 15.

[0061] In another embodiment, a Clostridial toxin enzymatic domain comprises a BoNT/F enzymatic domain. In an aspect of this embodiment, a BoNT/F enzymatic domain comprises the enzymatic domains of SEQ ID NO: 18, SEQ ID NO: 19, or SEQ ID NO: 20. In other aspects of this embodiment, a BoNT/F enzymatic domain comprises amino acids ½-428 of SEQ ID NO: 18. In another aspect of this embodiment, a BoNT/F enzymatic domain comprises a naturally occurring BoNT/F enzymatic domain variant, such as, e.g., an enzymatic domain from a BoNT/F isoform or an enzymatic domain from a BoNT/F subtype. In another aspect of this embodiment, a BoNT/F enzymatic domain comprises a naturally occurring BoNT/F enzymatic domain variant of SEQ ID NO: 18, SEQ ID NO: 19, or SEQ ID NO: 20, such as, e.g., a BoNT/F isoform enzymatic domain or a BoNT/F subtype enzymatic domain. In another aspect of this embodiment, a BoNT/F enzymatic domain comprises amino acids ½-428 of a naturally occurring BoNT/F enzymatic domain variant of SEQ ID NO: 18, such as, e.g., a BoNT/F isoform enzymatic domain or a BoNT/F subtype enzymatic domain. In still another aspect of this embodiment, a BoNT/F enzymatic domain comprises a non-naturally occurring BoNT/F enzymatic domain variant, such as, e.g., a conservative BoNT/F enzymatic domain variant, a non-conservative BoNT/F enzymatic domain variant, an active BoNT/F enzymatic domain fragment, or any combination thereof. In still another aspect of this embodiment, a BoNT/F enzymatic domain comprises the enzymatic domain of a non-naturally occurring BoNT/F enzymatic domain variant of SEQ ID NO: 18, SEQ ID NO: 19, or SEQ ID NO: 20, such as, e.g., a conservative BoNT/F enzymatic domain variant, a non-conservative BoNT/F enzymatic domain variant, an active BoNT/F enzymatic domain fragment, or any combination thereof. In still another aspect of this embodiment, a BoNT/F enzymatic domain comprises amino acids ½-428 of a non-naturally occurring BoNT/F enzymatic domain variant of SEQ ID NO: 18, such as, e.g., a conservative BoNT/F enzymatic domain variant, a non-conservative BoNT/F enzymatic domain variant, an active BoNT/F enzymatic domain fragment, or any combination thereof.

[0062] In other aspects of this embodiment, a BoNT/F enzymatic domain comprises a polypeptide having an amino acid identity of, e.g., at least 70%, at least 75%, at least 80%, at least 85%, at least 90%, or at least 95% to the enzymatic domain of SEQ ID NO: 18, SEQ ID NO: 19, or SEQ ID NO: 20; or at most 70%, at most 75%, at most 80%, at most 85%, at most 90%, or at most 95% to the enzymatic domain of SEQ ID NO: 18, SEQ ID NO: 19, or SEQ ID NO: 20. In yet other aspects of this embodiment, a BoNT/F enzymatic domain comprises a polypeptide having an amino acid identity of, e.g., at least 70%, at least 75%, at least 80%, at least 85%, at least 90%, or at least 95% to amino acids ½-428 of SEQ ID NO: 18; or at most 70%, at most 75%, at most 80%, at most 85%, at most 90%, or at most 95% to amino acids ½-428 of SEQ ID NO: 18.

[0063] In other aspects of this embodiment, a BoNT/F enzymatic domain comprises a polypeptide having, e.g., at most 1, 2, 3, 4, 5, 6, 7, 8, 9, 10, 20, 30, 40, 50, or 100 non-contiguous amino acid deletions, additions, and/or substitutions relative to the enzymatic domain of SEQ ID NO: 18, SEQ ID NO: 19, or SEQ ID NO: 20; or at most 1, 2, 3, 4, 5, 6, 7, 8, 9, 10, 20, 30, 40, 50, or 100 non-contiguous amino acid deletions, additions, and/or substitutions relative to the enzymatic domain of SEQ ID NO: 18, SEQ ID NO: 19, or SEQ ID NO: 20. In yet other aspects of this embodiment, a BoNT/F enzymatic domain comprises a polypeptide having, e.g., at most 1, 2, 3, 4, 5, 6, 7, 8, 9, 10, 20, 30, 40, 50, or 100 non-contiguous amino acid deletions, additions, and/or substitutions relative to amino acids ½-428 of SEQ ID NO: 18; or at most 1, 2, 3, 4, 5, 6, 7, 8, 9, 10, 20, 30, 40, 50, or 100 non-contiguous amino acid deletions, additions, and/or substitutions relative to amino acids ½-428 of SEQ ID NO: 18. In still other aspects of this embodiment, a BoNT/F enzymatic domain comprises a polypeptide having, e.g., at least 1, 2, 3, 4, 5, 6, 7, 8, 9, 10, 20, 30, 40, 50, or 100 contiguous amino acid deletions, additions, and/or substitutions relative to the enzymatic domain of SEQ ID NO: 18, SEQ ID NO: 19, or SEQ ID NO: 20; or at most 1, 2, 3, 4, 5, 6, 7, 8, 9, 10, 20, 30, 40, 50, or 100 contiguous amino acid deletions, additions, and/or substitutions relative to the enzymatic domain of SEQ ID NO: 18, SEQ ID NO: 19, or SEQ ID NO: 20. In further other aspects of this embodiment, a BoNT/F enzymatic domain comprises a polypeptide having, e.g., at least 1, 2, 3, 4, 5, 6, 7, 8, 9, 10, 20, 30, 40, 50, or 100 contiguous amino acid deletions, additions, and/or substitutions relative to amino acids ½-428 of SEQ ID NO: 18; or at most 1, 2, 3, 4, 5, 6, 7, 8, 9, 10, 20, 30, 40, 50, or 100 contiguous amino acid deletions, additions, and/or substitutions relative to amino acids ½-428 of SEQ ID NO: 18.

[0064] In another embodiment, a Clostridial toxin enzymatic domain comprises a BoNT/G enzymatic domain. In an aspect of this embodiment, a BoNT/G enzymatic domain comprises the enzymatic domains of SEQ ID NO: 21. In other aspects of this embodiment, a BoNT/G enzymatic domain comprises amino acids ½-4435 of SEQ ID NO: 21. In another aspect of this embodiment, a BoNT/G enzymatic domain comprises a naturally occurring BoNT/G enzymatic domain variant, such as, e.g., an enzymatic domain from a BoNT/G isoform or an enzymatic domain from a BoNT/G subtype. In another aspect of this embodiment, a BoNT/G enzymatic domain comprises a naturally occurring BoNT/G enzymatic domain variant of SEQ ID NO: 21, such as, e.g., a BoNT/G isoform enzymatic domain or a BoNT/G subtype enzymatic domain. In another aspect of this embodiment, a BoNT/G enzymatic domain comprises amino acids ½-4435 of a naturally occurring BoNT/G enzymatic domain variant of SEQ ID NO: 21, such as, e.g., a BoNT/G isoform enzymatic domain or a BoNT/G subtype enzymatic domain. In still another aspect of this embodiment, a BoNT/G enzymatic domain comprises a non-naturally occurring BoNT/G enzymatic domain variant, such as, e.g., a conservative BoNT/G enzymatic domain variant, a non-conservative BoNT/G enzymatic domain variant, an active BoNT/G enzymatic domain fragment, or any combination thereof. In still another aspect of this embodiment, a BoNT/G enzymatic domain comprises the enzymatic domain of a non-naturally occurring BoNT/G enzymatic domain variant of SEQ ID NO: 21, such as, e.g., a conservative BoNT/G enzymatic domain variant, a non-conservative BoNT/G enzymatic domain variant, an active BoNT/G enzymatic domain fragment, or any combination thereof. In still another aspect of this embodiment, a BoNT/G enzymatic domain comprises amino acids ½-4435 of a non-naturally occurring BoNT/G enzymatic domain variant of SEQ ID NO: 21, such as, e.g., a conservative BoNT/G enzymatic domain variant, a non-conservative BoNT/G enzymatic domain variant, an active BoNT/G enzymatic domain fragment, or any combination thereof.

[0065] In other aspects of this embodiment, a BoNT/G enzymatic domain comprises a polypeptide having an amino acid identity of, e.g., at least 70%, at least 75%, at least 80%, at least 85%, at least 90%, or at least 95% to the enzymatic domain of SEQ ID NO: 21; or at most 70%, at most 75%, at most 80%, at most 85%, at most 90%, or at most 95% to the enzymatic domain of SEQ ID NO: 21. In yet other aspects of this embodiment, a BoNT/G enzymatic domain comprises a polypeptide having an amino acid identity of, e.g., at least 70%, at least 75%, at least 80%, at least 85%, at least 90%, or at least 95% to amino acids ½-4435 of SEQ ID NO: 21; or at most 70%, at most 75%, at most 80%, at most 85%, at most 90%, or at most 95% to amino acids ½-4435 of SEQ ID NO: 21.

[0066] In other aspects of this embodiment, a BoNT/G enzymatic domain comprises a polypeptide having, e.g., at most 1, 2, 3, 4, 5, 6, 7, 8, 9, 10, 20, 30, 40, 50, or 100 non-contiguous amino acid deletions, additions, and/or substitutions relative to the enzymatic domain of SEQ ID NO: 21; or at most 1, 2, 3, 4, 5, 6, 7, 8, 9, 10, 20, 30, 40, 50, or 100 non-contiguous amino acid deletions, additions, and/or substitutions relative to the enzymatic domain of SEQ ID NO: 21. In yet other aspects of this embodiment, a BoNT/G enzymatic domain comprises a polypeptide having, e.g., at most 1, 2, 3, 4, 5, 6, 7, 8, 9, 10, 20, 30, 40, 50, or 100 non-contiguous amino acid deletions, additions, and/or substitutions relative to amino acids ½-4435 of SEQ ID NO: 21; or at most 1, 2, 3, 4, 5, 6, 7, 8, 9, 10, 20, 30, 40, 50, or 100 non-contiguous amino acid deletions, additions, and/or substitutions relative to amino acids ½-4435 of SEQ ID NO: 21. In still other aspects of this embodiment, a BoNT/G enzymatic domain comprises a polypeptide having, e.g., at least 1, 2, 3, 4, 5, 6, 7, 8, 9, 10, 20, 30, 40, 50, or 100 contiguous amino acid deletions, additions, and/or substitutions relative to the enzymatic domain of SEQ ID NO: 21; or at most 1, 2, 3, 4, 5, 6, 7, 8, 9, 10, 20, 30, 40, 50, or 100 contiguous amino acid deletions, additions, and/or substitutions relative to the enzymatic domain of SEQ ID NO: 21. In further other aspects of this embodiment, a BoNT/G enzymatic domain comprises a polypeptide having, e.g., at least 1, 2, 3, 4, 5, 6, 7, 8, 9, 10, 20, 30, 40, 50, or 100 contiguous amino acid deletions, additions, and/or substitutions relative to amino acids ½-4435 of SEQ ID NO: 21; or at most 1, 2, 3, 4, 5, 6, 7, 8, 9, 10, 20, 30, 40, 50, or 100 contiguous amino acid deletions, additions, and/or substitutions relative to amino acids ½-4435 of SEQ ID NO: 21.

[0067] In another embodiment, a Clostridial toxin enzymatic domain comprises a TeNT enzymatic domain. In an aspect of this embodiment, a TeNT enzymatic domain comprises the enzymatic domains of SEQ ID NO: 22. In other aspects of this embodiment, a TeNT enzymatic domain comprises amino acids ½-438 of SEQ ID NO: 22. In another aspect of this embodiment, a TeNT enzymatic domain comprises a naturally occurring TeNT enzymatic domain variant, such as, e.g., an enzymatic domain from a TeNT isoform or an enzymatic domain from a TeNT subtype. In another aspect of this embodiment, a TeNT enzymatic domain comprises a naturally occurring TeNT enzymatic domain variant of SEQ ID NO: 22, such as, e.g., a TeNT isoform enzymatic domain or a TeNT subtype enzymatic domain. In another aspect of this embodiment, a TeNT enzymatic domain comprises amino acids ½-438 of a naturally occurring TeNT enzymatic domain variant of SEQ ID NO: 22, such as, e.g., a TeNT isoform enzymatic domain or a TeNT subtype enzymatic domain. In still another aspect of this embodiment, a TeNT enzymatic domain comprises a non-naturally occurring TeNT enzymatic domain variant, such as, e.g., a conservative TeNT enzymatic domain variant, a non-conservative TeNT enzymatic domain variant, an active TeNT enzymatic domain fragment, or any combination thereof. In still another aspect of this embodiment, a TeNT enzymatic domain comprises the enzymatic domain of a non-naturally occurring TeNT enzymatic domain variant of SEQ ID NO: 22, such as, e.g., a conservative TeNT enzymatic domain variant, a non-conservative TeNT enzymatic domain variant, an active TeNT enzymatic domain fragment, or any combination thereof. In still another aspect of this embodiment, a TeNT enzymatic domain comprises amino acids ½-438 of a non-naturally occurring TeNT enzymatic domain variant of SEQ ID NO: 22, such as, e.g., a conservative TeNT enzymatic domain variant, a non-conservative TeNT enzymatic domain variant, an active TeNT enzymatic domain fragment, or any combination thereof.

[0068] In other aspects of this embodiment, a TeNT enzymatic domain comprises a polypeptide having an amino acid identity of, e.g., at least 70%, at least 75%, at least 80%, at least 85%, at least 90%, or at least 95% to the enzymatic domain of SEQ ID NO: 22; or at most 70%, at most 75%, at most 80%, at most 85%, at most 90%, or at most 95% to the enzymatic domain of SEQ ID NO: 22. In yet other aspects of this embodiment, a TeNT enzymatic domain comprises a polypeptide having an amino acid identity of, e.g., at least 70%, at least 75%, at least 80%, at least 85%, at least 90%, or at least 95% to amino acids ½-438 of SEQ ID NO: 22; or at most 70%, at most 75%, at most 80%, at most 85%, at most 90%, or at most 95% to amino acids ½-438 of SEQ ID NO: 22.

[0069] In other aspects of this embodiment, a TeNT enzymatic domain comprises a polypeptide having, e.g., at most 1, 2, 3, 4, 5, 6, 7, 8, 9, 10, 20, 30, 40, 50, or 100 non-contiguous amino acid deletions, additions, and/or substitutions relative to the enzymatic domain of SEQ ID NO: 22; or at most 1, 2, 3, 4, 5, 6, 7, 8, 9, 10, 20, 30, 40, 50, or 100 non-contiguous amino acid deletions, additions, and/or substitutions relative to the enzymatic domain of SEQ ID NO: 22. In yet other aspects of this embodiment, a TeNT enzymatic domain comprises a polypeptide having, e.g., at most 1, 2, 3, 4, 5, 6, 7, 8, 9, 10, 20, 30, 40, 50, or 100 non-contiguous amino acid deletions, additions, and/or substitutions relative to amino acids ½-438 of SEQ ID NO: 22; or at most 1, 2, 3, 4, 5, 6, 7, 8, 9, 10, 20, 30, 40, 50, or 100 non-contiguous amino acid deletions, additions, and/or substitutions relative to amino acids ½-438 of SEQ ID NO: 22. In still other aspects of this embodiment, a TeNT enzymatic domain comprises a polypeptide having, e.g., at least 1, 2, 3, 4, 5, 6, 7, 8, 9, 10, 20, 30, 40, 50, or 100 contiguous amino acid deletions, additions, and/or substitutions relative to the enzymatic domain of SEQ ID NO: 22; or at most 1, 2, 3, 4, 5, 6, 7, 8, 9, 10, 20, 30, 40, 50, or 100 contiguous amino acid deletions, additions, and/or substitutions relative to the enzymatic domain of SEQ ID NO: 22. In further other aspects of this embodiment, a TeNT enzymatic domain comprises a polypeptide having, e.g., at least 1, 2, 3, 4, 5, 6, 7, 8, 9, 10, 20, 30, 40, 50, or 100 contiguous amino acid deletions, additions, and/or substitutions relative to amino acids ½-438 of SEQ ID NO: 22; or at most 1, 2, 3, 4, 5, 6, 7, 8, 9, 10, 20, 30, 40, 50, or 100 contiguous amino acid deletions, additions, and/or substitutions relative to amino acids ½-438 of SEQ ID NO: 22.

[0070] In another embodiment, a Clostridial toxin enzymatic domain comprises a BaNT enzymatic domain. In an aspect of this embodiment, a BaNT enzymatic domain comprises the enzymatic domains of SEQ ID NO: 23. In other aspects of this embodiment, a BaNT enzymatic domain comprises amino acids ½-420 of SEQ ID NO: 23. In another aspect of this embodiment, a BaNT enzymatic domain comprises a naturally occurring BaNT enzymatic domain variant, such as, e.g., an enzymatic domain from a BaNT isoform or an enzymatic domain from a BaNT subtype. In another aspect of this embodiment, a BaNT enzymatic domain comprises a naturally occurring BaNT enzymatic domain variant of SEQ ID NO: 23, such as, e.g., a BaNT isoform enzymatic domain or a BaNT subtype enzymatic domain. In another aspect of this embodiment, a BaNT enzymatic domain comprises amino acids ½-420 of a naturally occurring BaNT enzymatic domain variant of SEQ ID NO: 23, such as, e.g., a BaNT isoform enzymatic domain or a BaNT subtype enzymatic domain. In still another aspect of this embodiment, a BaNT enzymatic domain comprises a non-naturally occurring BaNT enzymatic domain variant, such as, e.g., a conservative BaNT enzymatic domain variant, a non-conservative BaNT enzymatic domain variant, an active BaNT enzymatic domain fragment, or any combination thereof. In still another aspect of this embodiment, a BaNT enzymatic domain comprises the enzymatic domain of a non-naturally occurring BaNT enzymatic domain variant of SEQ ID NO: 23, such as, e.g., a conservative BaNT enzymatic domain variant, a non-conservative BaNT enzymatic domain variant, an active BaNT enzymatic domain fragment, or any combination thereof. In still another aspect of this embodiment, a BaNT enzymatic domain comprises amino acids ½-420 of a non-naturally occurring BaNT enzymatic domain variant of SEQ ID NO: 23, such as, e.g., a conservative BaNT enzymatic domain variant, a non-conservative BaNT enzymatic domain variant, an active BaNT enzymatic domain fragment, or any combination thereof.

[0071] In other aspects of this embodiment, a BaNT enzymatic domain comprises a polypeptide having an amino acid identity of, e.g., at least 70%, at least 75%, at least 80%, at least 85%, at least 90%, or at least 95% to the enzymatic domain of SEQ ID NO: 23; or at most 70%, at most 75%, at most 80%, at most 85%, at most 90%, or at most 95% to the enzymatic domain of SEQ ID NO: 23. In yet other aspects of this embodiment, a BaNT enzymatic domain comprises a polypeptide having an amino acid identity of, e.g., at least 70%, at least 75%, at least 80%, at least 85%, at least 90%, or at least 95% to amino acids ½-420 of SEQ ID NO: 23; or at most 70%, at most 75%, at most 80%, at most 85%, at most 90%, or at most 95% to amino acids ½-420 of SEQ ID NO: 23.

[0072] In other aspects of this embodiment, a BaNT enzymatic domain comprises a polypeptide having, e.g., at most 1, 2, 3, 4, 5, 6, 7, 8, 9, 10, 20, 30, 40, 50, or 100 non-contiguous amino acid deletions, additions, and/or substitutions relative to the enzymatic domain of SEQ ID NO: 23; or at most 1, 2, 3, 4, 5, 6, 7, 8, 9, 10, 20, 30, 40, 50, or 100 non-contiguous amino acid deletions, additions, and/or substitutions relative to the enzymatic domain of SEQ ID NO: 23. In yet other aspects of this embodiment, a BaNT enzymatic domain comprises a polypeptide having, e.g., at most 1, 2, 3, 4, 5, 6, 7, 8, 9, 10, 20, 30, 40, 50, or 100 non-contiguous amino acid deletions, additions, and/or substitutions relative to amino acids ½-420 of SEQ ID NO: 23; or at most 1, 2, 3, 4, 5, 6, 7, 8, 9, 10, 20, 30, 40, 50, or 100 non-contiguous amino acid deletions, additions, and/or substitutions relative to amino acids ½-420 of SEQ ID NO: 23. In still other aspects of this embodiment, a BaNT enzymatic domain comprises a polypeptide having, e.g., at least 1, 2, 3, 4, 5, 6, 7, 8, 9, 10, 20, 30, 40, 50, or 100 contiguous amino acid deletions, additions, and/or substitutions relative to the enzymatic domain of SEQ ID NO: 23; or at most 1, 2, 3, 4, 5, 6, 7, 8, 9, 10, 20, 30, 40, 50, or 100 contiguous amino acid deletions, additions, and/or substitutions relative to the enzymatic domain of SEQ ID NO: 23. In further other aspects of this embodiment, a BaNT enzymatic domain comprises a polypeptide having, e.g., at least 1, 2, 3, 4, 5, 6, 7, 8, 9, 10, 20, 30, 40, 50, or 100 contiguous amino acid deletions, additions, and/or substitutions relative to amino acids ½-420 of SEQ ID NO: 23; or at most 1, 2, 3, 4, 5, 6, 7, 8, 9, 10, 20, 30, 40, 50, or 100 contiguous amino acid deletions, additions, and/or substitutions relative to amino acids ½-420 of SEQ ID NO: 23.

[0073] In another embodiment, a Clostridial toxin enzymatic domain comprises a BuNT enzymatic domain. In an aspect of this embodiment, a BuNT enzymatic domain comprises the enzymatic domains of SEQ ID NO: 24 or SEQ ID NO: 25. In other aspects of this embodiment, a BuNT enzymatic domain comprises amino acids ½-411 of SEQ ID NO: 24. In another aspect of this embodiment, a BuNT enzymatic domain comprises a naturally occurring BuNT enzymatic domain variant, such as, e.g., an enzymatic domain from a BuNT isoform or an enzymatic domain from a BuNT subtype. In another aspect of this embodiment, a BuNT enzymatic domain comprises a naturally occurring BuNT enzymatic domain variant of SEQ ID NO: 24 or SEQ ID NO: 25, such as, e.g., a BuNT isoform enzymatic domain or a BuNT subtype enzymatic domain. In another aspect of this embodiment, a BuNT enzymatic domain comprises amino acids ½-411 of a naturally occurring BuNT enzymatic domain variant of SEQ ID NO: 24, such as, e.g., a BuNT isoform enzymatic domain or a BuNT subtype enzymatic domain. In still another aspect of this embodiment, a BuNT enzymatic domain comprises a non-naturally occurring BuNT enzymatic domain variant, such as, e.g., a conservative BuNT enzymatic domain variant, a non-conservative BuNT enzymatic domain variant, an active BuNT enzymatic domain fragment, or any combination thereof. In still another aspect of this embodiment, a BuNT enzymatic domain comprises the enzymatic domain of a non-naturally occurring BuNT enzymatic domain variant of SEQ ID NO: 24 or SEQ ID NO: 25, such as, e.g., a conservative BuNT enzymatic domain variant, a non-conservative BuNT enzymatic domain variant, an active BuNT enzymatic domain fragment, or any combination thereof. In still another aspect of this embodiment, a BuNT enzymatic domain comprises amino acids ½-411 of a non-naturally occurring BuNT enzymatic domain variant of SEQ ID NO: 24, such as, e.g., a conservative BuNT enzymatic domain variant, a non-conservative BuNT enzymatic domain variant, an active BuNT enzymatic domain fragment, or any combination thereof.

[0074] In other aspects of this embodiment, a BuNT enzymatic domain comprises a polypeptide having an amino acid identity of, e.g., at least 70%, at least 75%, at least 80%, at least 85%, at least 90%, or at least 95% to the enzymatic domain of SEQ ID NO: 24 or SEQ ID NO: 25; or at most 70%, at most 75%, at most 80%, at most 85%, at most 90%, or at most 95% to the enzymatic domain of SEQ ID NO: 24 or SEQ ID NO: 25. In yet other aspects of this embodiment, a BuNT enzymatic domain comprises a polypeptide having an amino acid identity of, e.g., at least 70%, at least 75%, at least 80%, at least 85%, at least 90%, or at least 95% to amino acids ½-411 of SEQ ID NO: 24 or SEQ ID NO: 25; or at most 70%, at most 75%, at most 80%, at most 85%, at most 90%, or at most 95% to amino acids ½-411 of SEQ ID NO: 24 or SEQ ID NO: 25.

[0075] In other aspects of this embodiment, a BuNT enzymatic domain comprises a polypeptide having, e.g., at most 1, 2, 3, 4, 5, 6, 7, 8, 9, 10, 20, 30, 40, 50, or 100 non-contiguous amino acid deletions, additions, and/or substitutions relative to the enzymatic domain of SEQ ID NO: 24 or SEQ ID NO: 25; or at most 1, 2, 3, 4, 5, 6, 7, 8, 9, 10, 20, 30, 40, 50, or 100 non-contiguous amino acid deletions, additions, and/or substitutions relative to the enzymatic domain of SEQ ID NO: 24 OR SEQ ID NO: 25. In yet other aspects of this embodiment, a BuNT enzymatic domain comprises a polypeptide having, e.g., at most 1, 2, 3, 4, 5, 6, 7, 8, 9, 10, 20, 30, 40, 50, or 100 non-contiguous amino acid deletions, additions, and/or substitutions relative to amino acids ½-411 of SEQ ID NO: 24 or SEQ ID NO: 25; or at most 1, 2, 3, 4, 5, 6, 7, 8, 9, 10, 20, 30, 40, 50, or 100 non-contiguous amino acid deletions, additions, and/or substitutions relative to amino acids ½-411 of SEQ ID NO: 24 or SEQ ID NO: 25. In still other aspects of this embodiment, a BuNT enzymatic domain comprises a polypeptide having, e.g., at least 1, 2, 3, 4, 5, 6, 7, 8, 9, 10, 20, 30, 40, 50, or 100 contiguous amino acid deletions, additions, and/or substitutions relative to the enzymatic domain of SEQ ID NO: 24 or SEQ ID NO: 25; or at most 1, 2, 3, 4, 5, 6, 7, 8, 9, 10, 20, 30, 40, 50, or 100 contiguous amino acid deletions, additions, and/or substitutions relative to the enzymatic domain of SEQ ID NO: 24 or SEQ ID NO: 25. In further other aspects of this embodiment, a BuNT enzymatic domain comprises a polypeptide having, e.g., at least 1, 2, 3, 4, 5, 6, 7, 8, 9, 10, 20, 30, 40, 50, or 100 contiguous amino acid deletions, additions, and/or substitutions relative to amino acids ½-411 of SEQ ID NO: 24 or SEQ ID NO: 25; or at most 1, 2, 3, 4, 5, 6, 7, 8, 9, 10, 20, 30, 40, 50, or 100 contiguous amino acid deletions, additions, and/or substitutions relative to amino acids ½-411 of SEQ ID NO: 24 or SEQ ID NO: 25.

[0076] The “translocation domain” comprises a portion of a Clostridial neurotoxin heavy chain having a translocation activity. By “translocation” is meant the ability to facilitate the transport of a polypeptide through a vesicular membrane, thereby exposing some or all of the polypeptide to the cytoplasm. In the various botulinum neurotoxins translocation is thought to involve an allosteric conformational change of the heavy chain caused by a decrease in pH within the endosome. This conformational change appears to involve and be mediated by the N terminal half of the heavy chain and to result in the formation of pores in the vesicular membrane; this change permits the movement of the proteolytic light chain from within the endosomal vesicle into the cytoplasm. See e.g., Lacy, et al., Nature Struct. Biol. 5:898-902 (October 1998).

[0077] The amino acid sequence of the translocation-mediating portion of the botulinum neurotoxin heavy chain is known to those of skill in the art; additionally, those amino acid residues within this portion that are known to be essential for conferring the translocation activity are also known. It would therefore be well within the ability of one of ordinary skill in the art, for example, to employ the naturally occurring N-terminal peptide half of the heavy chain of any of the various Clostridium tetanus or Clostridium botulinum neurotoxin subtypes as a translocation domain, or to design an analogous translocation domain by aligning the primary sequences of the N-terminal halves of the various heavy chains and selecting a consensus primary translocation sequence based on conserved amino acid, polarity, steric and hydrophobicity characteristics between the sequences.

[0078] Aspects of the present specification provide, in part, a TVEMP comprising a Clostridial toxin translocation domain. As used herein, the term “Clostridial toxin translocation domain” refers to any Clostridial toxin polypeptide that can execute the translocation step of the intoxication process that mediates Clostridial toxin light chain translocation. Thus, a Clostridial toxin translocation domain facilitates the movement of a Clostridial toxin light chain across a membrane and encompasses the movement of a Clostridial toxin light chain through the membrane an intracellular vesicle into the cytoplasm of a cell. Non-limiting examples of a Clostridial toxin translocation domain include, e.g., a BoNT/A translocation domain, a BoNT/B translocation domain, a BoNT/C1 translocation domain, a BoNT/D translocation domain, a BoNT/E translocation domain, a BoNT/F translocation domain, a BoNT/G translocation domain, a TeNT translocation domain, a BaNT translocation domain, and a BuNT translocation domain.

[0079] A Clostridial toxin translocation domain includes, without limitation, naturally occurring Clostridial toxin translocation domain variants, such as, e.g., Clostridial toxin translocation domain isoforms and Clostridial toxin translocation domain subtypes; non-naturally occurring Clostridial toxin translocation domain variants, such as, e.g., conservative Clostridial toxin translocation domain variants, non-conservative Clostridial toxin translocation domain variants, active Clostridial toxin translocation domain fragments thereof, or any combination thereof.

[0080] As used herein, the term “Clostridial toxin translocation domain variant,” whether naturally-occurring or non-naturally-occurring, refers to a Clostridial toxin translocation domain that has at least one amino acid change from the corresponding region of the disclosed reference sequences (Table 1) and can be described in percent identity to the corresponding region of that reference sequence. Unless expressly indicated, Clostridial toxin translocation domain variants useful to practice disclosed embodiments are variants that execute the translocation step of the intoxication process that mediates Clostridial toxin light chain translocation. As non-limiting examples, a BoNT/A translocation domain variant will have at least one amino acid difference, such as, e.g., an amino acid substitution, deletion or addition, as compared to amino acids 455-873 of SEQ ID NO: 1; a BoNT/B translocation domain variant will have at least one amino acid difference, such as, e.g., an amino acid substitution, deletion or addition, as compared to amino acids 447-860 of SEQ ID NO: 6; a BoNT/C1 translocation domain variant will have at least one amino acid difference, such as, e.g., an amino acid substitution, deletion or addition, as compared to amino acids 454-868 of SEQ ID NO: 11; a BoNT/D translocation domain variant will have at least one amino acid difference, such as, e.g., an amino acid substitution, deletion or addition, as compared to amino acids 451-864 of SEQ ID NO: 13; a BoNT/E translocation domain variant will have at least one amino acid difference, such as, e.g., an amino acid substitution, deletion or addition, as compared to amino acids 427-847 of SEQ ID NO: 15; a BoNT/F translocation domain variant will have at least one amino acid difference, such as, e.g., an amino acid substitution, deletion or addition, as compared to amino acids 446-865 of SEQ ID NO: 18; a BoNT/G translocation domain variant will have at least one amino acid difference, such as, e.g., an amino acid substitution, deletion or addition, as compared to amino acids 451-865 of SEQ ID NO: 21; a TeNT translocation domain variant will have at least one amino acid difference, such as, e.g., an amino acid substitution, deletion or addition, as compared to amino acids 468-881 of SEQ ID NO: 22; a BaNT translocation domain variant will have at least one amino acid difference, such as, e.g., an amino acid substitution, deletion or addition, as compared to amino acids 436-857 of SEQ ID NO: 23; and a BuNT translocation domain variant will have at least one amino acid difference, such as, e.g., an amino acid substitution, deletion or addition, as compared to amino acids 427-847 of SEQ ID NO: 24.

[0081] It is recognized by those of skill in the art that within each serotype of Clostridial toxin there can be naturally occurring Clostridial toxin translocation domain variants that differ somewhat in their amino acid sequence, and also in the nucleic acids encoding these proteins. For example, there are presently five BoNT/A subtypes, BoNT/A1, BoNT/A2, BoNT/A3, BoNT/A4, and BoNT/A5, with specific translocation domain subtypes showing about 85-87% amino acid identity when compared to the BoNT/A translocation domain subtype of SEQ ID NO: 1. As used herein, the term “naturally occurring Clostridial toxin translocation domain variant” refers to any Clostridial toxin translocation domain produced by a naturally-occurring process, including, without limitation, Clostridial toxin translocation domain isoforms produced from alternatively-spliced transcripts, Clostridial toxin translocation domain isoforms produced by spontaneous mutation and Clostridial toxin translocation domain subtypes. A naturally occurring Clostridial toxin translocation domain variant can function in substantially the same manner as the reference Clostridial toxin translocation domain on which the naturally occurring Clostridial toxin translocation domain variant is based, and can be substituted for the reference Clostridial toxin translocation domain in any aspect of the present specification.

[0082] A non-limiting examples of a naturally occurring Clostridial toxin translocation domain variant is a Clostridial toxin translocation domain isoform such as, e.g., a BoNT/A translocation domain isoform, a BoNT/B translocation domain isoform, a BoNT/C1 translocation domain isoform, a BoNT/D translocation domain isoform, a BoNT/E translocation domain isoform, a BoNT/F translocation domain isoform, a BoNT/G translocation domain isoform, a TeNT translocation domain isoform, a BaNT translocation domain isoform, and a BuNT translocation domain isoform. Another non-limiting examples of a naturally occurring Clostridial toxin translocation domain variant is a Clostridial toxin translocation domain subtype such as, e.g., a translocation domain from subtype BoNT/A1, BoNT/A2, BoNT/A3, BoNT/A4, and BoNT/A5; a translocation domain from subtype BoNT/B1, BoNT/B2, BoNT/B bivalent and BoNT/B nonproteolytic; a translocation domain from subtype BoNT/C1-1 and BoNT/C1-2; a translocation domain from subtype BoNT/E1, BoNT/E2 and BoNT/E3; a translocation domain from subtype BoNT/F1, BoNT/F2, BoNT/F3; and a translocation domain from subtype BuNT-1 and BuNT-2.

[0083] As used herein, the term “non-naturally occurring Clostridial toxin translocation domain variant” refers to any Clostridial toxin translocation domain produced with the aid of human manipulation, including, without limitation, Clostridial toxin translocation domains produced by genetic engineering using random mutagenesis or rational design and Clostridial toxin translocation domains produced by chemical synthesis. Non-limiting examples of non-naturally occurring Clostridial toxin translocation domain variants include, e.g., conservative Clostridial toxin translocation domain variants, non-conservative Clostridial toxin translocation domain variants, and active Clostridial toxin translocation domain fragments.

[0084] As used herein, the term “conservative Clostridial toxin translocation domain variant” refers to a Clostridial toxin translocation domain that has at least one amino acid substituted by another amino acid or an amino acid analog that has at least one property similar to that of the original amino acid from the reference Clostridial toxin translocation domain sequence (Table 1). Examples of properties include, without limitation, similar size, topography, charge, hydrophobicity, hydrophilicity, lipophilicity, covalent-bonding capacity, hydrogen-bonding capacity, a physicochemical property, of the like, or any combination thereof. A conservative Clostridial toxin translocation domain variant can function in substantially the same manner as the reference Clostridial toxin translocation domain on which the conservative Clostridial toxin translocation domain variant is based, and can be substituted for the reference Clostridial toxin translocation domain in any aspect of the present specification. Non-limiting examples of a conservative Clostridial toxin translocation domain variant include, e.g., conservative BoNT/A translocation domain variants, conservative BoNT/B translocation domain variants, conservative BoNT/C1 translocation domain variants, conservative BoNT/D translocation domain variants, conservative BoNT/E translocation domain variants, conservative BoNT/F translocation domain variants, conservative BoNT/G translocation domain variants, conservative TeNT translocation domain variants, conservative BaNT translocation domain variants, and conservative BuNT translocation domain variants.

[0085] As used herein, the term “non-conservative Clostridial toxin translocation domain variant” refers to a Clostridial toxin translocation domain in which 1) at least one amino acid is deleted from the reference Clostridial toxin translocation domain on which the non-conservative Clostridial toxin translocation domain variant is based; 2) at least one amino acid added to the reference Clostridial toxin translocation domain on which the non-conservative Clostridial toxin translocation domain is based; or 3) at least one amino acid is substituted by another amino acid or an amino acid analog that does not share any property similar to that of the original amino acid from the reference Clostridial toxin translocation domain sequence (Table 1). A non-conservative Clostridial toxin translocation domain variant can function in substantially the same manner as the reference Clostridial toxin translocation domain on which the non-conservative Clostridial toxin translocation domain variant is based, and can be substituted for the reference Clostridial toxin translocation domain in any aspect of the present specification. Non-limiting examples of a non-conservative Clostridial toxin translocation domain variant include, e.g., non-conservative BoNT/A translocation domain variants, non-conservative BoNT/B translocation domain variants, non-conservative BoNT/C1 translocation domain variants, non-conservative BoNT/D translocation domain variants, non-conservative BoNT/E translocation domain variants, non-conservative BoNT/F translocation domain variants, non-conservative BoNT/G translocation domain variants, and non-conservative TeNT translocation domain variants, non-conservative BaNT translocation domain variants, and non-conservative BuNT translocation domain variants.

[0086] As used herein, the term “active Clostridial toxin translocation domain fragment” refers to any of a variety of Clostridial toxin fragments comprising the translocation domain can be useful in aspects of the present specification with the proviso that these active fragments can facilitate the release of the LC from intracellular vesicles into the cytoplasm of the target cell and thus participate in executing the overall cellular mechanism whereby a Clostridial toxin proteolytically cleaves a substrate. The translocation domains from the heavy chains of Clostridial toxins are approximately 410-430 amino acids in length and comprise a translocation domain (Table 1). Research has shown that the entire length of a translocation domain from a Clostridial toxin heavy chain is not necessary for the translocating activity of the translocation domain. Thus, aspects of this embodiment include a Clostridial toxin translocation domain having a length of, e.g., at least 350, 375, 400, or 425 amino acids. Other aspects of this embodiment include a Clostridial toxin translocation domain having a length of, e.g., at most 350, 375, 400, or 425 amino acids.

[0087] Any of a variety of sequence alignment methods can be used to determine percent identity of naturally-occurring Clostridial toxin translocation domain variants and non-naturally-occurring Clostridial toxin translocation domain variants, including, without limitation, global methods, local methods and hybrid methods, such as, e.g., segment approach methods. Protocols to determine percent identity are routine procedures within the scope of one skilled in the art and from the teaching herein.

[0088] Thus, in an embodiment, a TVEMP disclosed herein comprises a Clostridial toxin translocation domain. In an aspect of this embodiment, a Clostridial toxin translocation domain comprises a naturally occurring Clostridial toxin translocation domain variant, such as, e.g., a Clostridial toxin translocation domain isoform or a Clostridial toxin translocation domain subtype. In another aspect of this embodiment, a Clostridial toxin translocation domain comprises a non-naturally occurring Clostridial toxin translocation domain variant, such as, e.g., a conservative Clostridial toxin translocation domain variant, a non-conservative Clostridial toxin translocation domain variant, an active Clostridial toxin translocation domain fragment, or any combination thereof.

[0089] In another embodiment, a hydrophic amino acid at one particular position in the polypeptide chain of the Clostridial toxin translocation domain can be substituted with another hydrophic amino acid. Examples of hydrophic amino acids include, e.g., C, F, I, L, M, V and W. In another aspect of this embodiment, an aliphatic amino acid at one particular position in the polypeptide chain of the Clostridial toxin translocation domain can be substituted with another aliphatic amino acid. Examples of aliphatic amino acids include, e.g., A, I, L, P, and V. In yet another aspect of this embodiment, an aromatic amino acid at one particular position in the polypeptide chain of the Clostridial toxin translocation domain can be substituted with another aromatic amino acid. Examples of aromatic amino acids include, e.g., F, H, W and Y. In still another aspect of this embodiment, a stacking amino acid at one particular position in the polypeptide chain of the Clostridial toxin translocation domain can be substituted with another stacking amino acid. Examples of stacking amino acids include, e.g., F, H, W and Y. In a further aspect of this embodiment, a polar amino acid at one particular position in the polypeptide chain of the Clostridial toxin translocation domain can be substituted with another polar amino acid. Examples of polar amino acids include, e.g., D, E, K, N, Q, and R. In a further aspect of this embodiment, a less polar or indifferent amino acid at one particular position in the polypeptide chain of the Clostridial toxin translocation domain can be substituted with another less polar or indifferent amino acid. Examples of less polar or indifferent amino acids include, e.g., A, H, G, P, S, T, and Y. In a yet further aspect of this embodiment, a positive charged amino acid at one particular position in the polypeptide chain of the Clostridial toxin translocation domain can be substituted with another positive charged amino acid. Examples of positive charged amino acids include, e.g., K, R, and H. In a still further aspect of this embodiment, a negative charged amino acid at one particular position in the polypeptide chain of the Clostridial toxin translocation domain can be substituted with another negative charged amino acid. Examples of negative charged amino acids include, e.g., D and E. In another aspect of this embodiment, a small amino acid at one particular position in the polypeptide chain of the Clostridial toxin translocation domain can be substituted with another small amino acid. Examples of small amino acids include, e.g., A, D, G, N, P, S, and T. In yet another aspect of this embodiment, a C-beta branching amino acid at one particular position in the polypeptide chain of the Clostridial toxin translocation domain can be substituted with another C-beta branching amino acid. Examples of C-beta branching amino acids include, e.g., I, T and V.

[0090] In another embodiment, a Clostridial toxin translocation domain comprises a BoNT/A translocation domain. In an aspect of this embodiment, a BoNT/A translocation domain comprises the translocation domains of SEQ ID NO: 1, SEQ ID NO: 2, SEQ ID NO: 3, SEQ ID NO: 4, or SEQ ID NO: 5. In other aspects of this embodiment, a BoNT/A translocation domain comprises amino acids 455-873 of SEQ ID NO: 1. In another aspect of this embodiment, a BoNT/A translocation domain comprises a naturally occurring BoNT/A translocation domain variant, such as, e.g., an translocation domain from a BoNT/A isoform or an translocation domain from a BoNT/A subtype. In another aspect of this embodiment, a BoNT/A translocation domain comprises a naturally occurring BoNT/A translocation domain variant of SEQ ID NO: 1, SEQ ID NO: 2, SEQ ID NO: 3, SEQ ID NO: 4, or SEQ ID NO: 5, such as, e.g., a BoNT/A isoform translocation domain or a BoNT/A subtype translocation domain. In another aspect of this embodiment, a BoNT/A translocation domain comprises amino acids 455-873 of a naturally occurring BoNT/A translocation domain variant of SEQ ID NO: 1, such as, e.g., a BoNT/A isoform translocation domain or a BoNT/A subtype translocation domain. In still another aspect of this embodiment, a BoNT/A translocation domain comprises a non-naturally occurring BoNT/A translocation domain variant, such as, e.g., a conservative BoNT/A translocation domain variant, a non-conservative BoNT/A translocation domain variant, an active BoNT/A translocation domain fragment, or any combination thereof. In still another aspect of this embodiment, a BoNT/A translocation domain comprises the translocation domain of a non-naturally occurring BoNT/A translocation domain variant of SEQ ID NO: 1, SEQ ID NO: 2, SEQ ID NO: 3, SEQ ID NO: 4, or SEQ ID NO: 5, such as, e.g., a conservative BoNT/A translocation domain variant, a non-conservative BoNT/A translocation domain variant, an active BoNT/A translocation domain fragment, or any combination thereof. In still another aspect of this embodiment, a BoNT/A translocation domain comprises amino acids 455-873 of a non-naturally occurring BoNT/A translocation domain variant of SEQ ID NO: 1, such as, e.g., a conservative BoNT/A translocation domain variant, a non-conservative BoNT/A translocation domain variant, an active BoNT/A translocation domain fragment, or any combination thereof.

[0091] In other aspects of this embodiment, a BoNT/A translocation domain comprises a polypeptide having an amino acid identity of, e.g., at least 70%, at least 75%, at least 80%, at least 85%, at least 90%, or at least 95% to the translocation domain of SEQ ID NO: 1, SEQ ID NO: 2, SEQ ID NO: 3, SEQ ID NO: 4, or SEQ ID NO: 5; or at most 70%, at most 75%, at most 80%, at most 85%, at most 90%, or at most 95% to the translocation domain of SEQ ID NO: 1, SEQ ID NO: 2, SEQ ID NO: 3, SEQ ID NO: 4, or SEQ ID NO: 5. In yet other aspects of this embodiment, a BoNT/A translocation domain comprises a polypeptide having an amino acid identity of, e.g., at least 70%, at least 75%, at least 80%, at least 85%, at least 90%, or at least 95% to amino acids 455-873 of SEQ ID NO: 1; or at most 70%, at most 75%, at most 80%, at most 85%, at most 90%, or at most 95% to amino acids 455-873 of SEQ ID NO: 1.

[0092] In other aspects of this embodiment, a BoNT/A translocation domain comprises a polypeptide having, e.g., at most 1, 2, 3, 4, 5, 6, 7, 8, 9, 10, 20, 30, 40, 50, or 100 non-contiguous amino acid deletions, additions, and/or substitutions relative to the translocation domain of SEQ ID NO: 1, SEQ ID NO: 2, SEQ ID NO: 3, SEQ ID NO: 4, or SEQ ID NO: 5; or at most 1, 2, 3, 4, 5, 6, 7, 8, 9, 10, 20, 30, 40, 50, or 100 non-contiguous amino acid deletions, additions, and/or substitutions relative to the translocation domain of SEQ ID NO: 1, SEQ ID NO: 2, SEQ ID NO: 3, SEQ ID NO: 4, or SEQ ID NO: 5. In yet other aspects of this embodiment, a BoNT/A translocation domain comprises a polypeptide having, e.g., at most 1, 2, 3, 4, 5, 6, 7, 8, 9, 10, 20, 30, 40, 50, or 100 non-contiguous amino acid deletions, additions, and/or substitutions relative to amino acids 455-873 of SEQ ID NO: 1; or at most 1, 2, 3, 4, 5, 6, 7, 8, 9, 10, 20, 30, 40, 50, or 100 non-contiguous amino acid deletions, additions, and/or substitutions relative to amino acids 455-873 of SEQ ID NO: 1. In still other aspects of this embodiment, a BoNT/A translocation domain comprises a polypeptide having, e.g., at least 1, 2, 3, 4, 5, 6, 7, 8, 9, 10, 20, 30, 40, 50, or 100 contiguous amino acid deletions, additions, and/or substitutions relative to the translocation domain of SEQ ID NO: 1, SEQ ID NO: 2, SEQ ID NO: 3, SEQ ID NO: 4, or SEQ ID NO: 5; or at most 1, 2, 3, 4, 5, 6, 7, 8, 9, 10, 20, 30, 40, 50, or 100 contiguous amino acid deletions, additions, and/or substitutions relative to the translocation domain of SEQ ID NO: 1, SEQ ID NO: 2, SEQ ID NO: 3, SEQ ID NO: 4, or SEQ ID NO: 5. In further other aspects of this embodiment, a BoNT/A translocation domain comprises a polypeptide having, e.g., at least 1, 2, 3, 4, 5, 6, 7, 8, 9, 10, 20, 30, 40, 50, or 100 contiguous amino acid deletions, additions, and/or substitutions relative to amino acids 455-873 of SEQ ID NO: 1; or at most 1, 2, 3, 4, 5, 6, 7, 8, 9, 10, 20, 30, 40, 50, or 100 contiguous amino acid deletions, additions, and/or substitutions relative to amino acids 455-873 of SEQ ID NO: 1.

[0093] In another embodiment, a Clostridial toxin translocation domain comprises a BoNT/B translocation domain. In an aspect of this embodiment, a BoNT/B translocation domain comprises the translocation domains of SEQ ID NO: 6, SEQ ID NO: 7, SEQ ID NO: 8, SEQ ID NO: 9, or SEQ ID NO: 10. In other aspects of this embodiment, a BoNT/B translocation domain comprises amino acids 447-860 of SEQ ID NO: 6. In another aspect of this embodiment, a BoNT/B translocation domain comprises a naturally occurring BoNT/B translocation domain variant, such as, e.g., an translocation domain from a BoNT/B isoform or an translocation domain from a BoNT/B subtype. In another aspect of this embodiment, a BoNT/B translocation domain comprises a naturally occurring BoNT/B translocation domain variant of SEQ ID NO: 6, SEQ ID NO: 7, SEQ ID NO: 8, SEQ ID NO: 9, or SEQ ID NO: 10, such as, e.g., a BoNT/B isoform translocation domain or a BoNT/B subtype translocation domain. In another aspect of this embodiment, a BoNT/B translocation domain comprises amino acids 447-860 of a naturally occurring BoNT/B translocation domain variant of SEQ ID NO: 6, such as, e.g., a BoNT/B isoform translocation domain or a BoNT/B subtype translocation domain. In still another aspect of this embodiment, a BoNT/B translocation domain comprises a non-naturally occurring BoNT/B translocation domain variant, such as, e.g., a conservative BoNT/B translocation domain variant, a non-conservative BoNT/B translocation domain variant, an active BoNT/B translocation domain fragment, or any combination thereof. In still another aspect of this embodiment, a BoNT/B translocation domain comprises the translocation domain of a non-naturally occurring BoNT/B translocation domain variant of SEQ ID NO: 6, SEQ ID NO: 7, SEQ ID NO: 8, SEQ ID NO: 9, or SEQ ID NO: 10, such as, e.g., a conservative BoNT/B translocation domain variant, a non-conservative BoNT/B translocation domain variant, an active BoNT/B translocation domain fragment, or any combination thereof. In still another aspect of this embodiment, a BoNT/B translocation domain comprises amino acids 447-860 of a non-naturally occurring BoNT/B translocation domain variant of SEQ ID NO: 6, such as, e.g., a conservative BoNT/B translocation domain variant, a non-conservative BoNT/B translocation domain variant, an active BoNT/B translocation domain fragment, or any combination thereof.

[0094] In other aspects of this embodiment, a BoNT/B translocation domain comprises a polypeptide having an amino acid identity of, e.g., at least 70%, at least 75%, at least 80%, at least 85%, at least 90%, or at least 95% to the translocation domain of SEQ ID NO: 6, SEQ ID NO: 7, SEQ ID NO: 8, SEQ ID NO: 9, or SEQ ID NO: 10; or at most 70%, at most 75%, at most 80%, at most 85%, at most 90%, or at most 95% to the translocation domain of SEQ ID NO: 6, SEQ ID NO: 7, SEQ ID NO: 8, SEQ ID NO: 9, or SEQ ID NO: 10. In yet other aspects of this embodiment, a BoNT/B translocation domain comprises a polypeptide having an amino acid identity of, e.g., at least 70%, at least 75%, at least 80%, at least 85%, at least 90%, or at least 95% to amino acids 447-860 of SEQ ID NO: 6; or at most 70%, at most 75%, at most 80%, at most 85%, at most 90%, or at most 95% to amino acids 447-860 of SEQ ID NO: 6.

[0095] In other aspects of this embodiment, a BoNT/B translocation domain comprises a polypeptide having, e.g., at most 1, 2, 3, 4, 5, 6, 7, 8, 9, 10, 20, 30, 40, 50, or 100 non-contiguous amino acid deletions, additions, and/or substitutions relative to the translocation domain of SEQ ID NO: 6, SEQ ID NO: 7, SEQ ID NO: 8, SEQ ID NO: 9, or SEQ ID NO: 10; or at most 1, 2, 3, 4, 5, 6, 7, 8, 9, 10, 20, 30, 40, 50, or 100 non-contiguous amino acid deletions, additions, and/or substitutions relative to the translocation domain of SEQ ID NO: 6, SEQ ID NO: 7, SEQ ID NO: 8, SEQ ID NO: 9, or SEQ ID NO: 10. In yet other aspects of this embodiment, a BoNT/B translocation domain comprises a polypeptide having, e.g., at most 1, 2, 3, 4, 5, 6, 7, 8, 9, 10, 20, 30, 40, 50, or 100 non-contiguous amino acid deletions, additions, and/or substitutions relative to amino acids 447-860 of SEQ ID NO: 6; or at most 1, 2, 3, 4, 5, 6, 7, 8, 9, 10, 20, 30, 40, 50, or 100 non-contiguous amino acid deletions, additions, and/or substitutions relative to amino acids 447-860 of SEQ ID NO: 6. In still other aspects of this embodiment, a BoNT/B translocation domain comprises a polypeptide having, e.g., at least 1, 2, 3, 4, 5, 6, 7, 8, 9, 10, 20, 30, 40, 50, or 100 contiguous amino acid deletions, additions, and/or substitutions relative to the translocation domain of SEQ ID NO: 6, SEQ ID NO: 7, SEQ ID NO: 8, SEQ ID NO: 9, or SEQ ID NO: 10; or at most 1, 2, 3, 4, 5, 6, 7, 8, 9, 10, 20, 30, 40, 50, or 100 contiguous amino acid deletions, additions, and/or substitutions relative to the translocation domain of SEQ ID NO: 6, SEQ ID NO: 7, SEQ ID NO: 8, SEQ ID NO: 9, or SEQ ID NO: 10. In further other aspects of this embodiment, a BoNT/B translocation domain comprises a polypeptide having, e.g., at least 1, 2, 3, 4, 5, 6, 7, 8, 9, 10, 20, 30, 40, 50, or 100 contiguous amino acid deletions, additions, and/or substitutions relative to amino acids 447-860 of SEQ ID NO: 6; or at most 1, 2, 3, 4, 5, 6, 7, 8, 9, 10, 20, 30, 40, 50, or 100 contiguous amino acid deletions, additions, and/or substitutions relative to amino acids 447-860 of SEQ ID NO: 6.

[0096] In another embodiment, a Clostridial toxin translocation domain comprises a BoNT/C1 translocation domain. In an aspect of this embodiment, a BoNT/C1 translocation domain comprises the translocation domains of SEQ ID NO: 11 or SEQ ID NO: 12. In other aspects of this embodiment, a BoNT/C1 translocation domain comprises amino acids 454-868 of SEQ ID NO: 11. In another aspect of this embodiment, a BoNT/C1 translocation domain comprises a naturally occurring BoNT/C1 translocation domain variant, such as, e.g., an translocation domain from a BoNT/C1 isoform or an translocation domain from a BoNT/C1 subtype. In another aspect of this embodiment, a BoNT/C1 translocation domain comprises a naturally occurring BoNT/C1 translocation domain variant of SEQ ID NO: 11 or SEQ ID NO: 12, such as, e.g., a BoNT/C1 isoform translocation domain or a BoNT/C1 subtype translocation domain. In another aspect of this embodiment, a BoNT/C1 translocation domain comprises amino acids 454-868 of a naturally occurring BoNT/C1 translocation domain variant of SEQ ID NO: 11, such as, e.g., a BoNT/C1 isoform translocation domain or a BoNT/C1 subtype translocation domain. In still another aspect of this embodiment, a BoNT/C1 translocation domain comprises a non-naturally occurring BoNT/C1 translocation domain variant, such as, e.g., a conservative BoNT/C1 translocation domain variant, a non-conservative BoNT/C1 translocation domain variant, an active BoNT/C1 translocation domain fragment, or any combination thereof. In still another aspect of this embodiment, a BoNT/C1 translocation domain comprises the translocation domain of a non-naturally occurring BoNT/C1 translocation domain variant of SEQ ID NO: 11 or SEQ ID NO: 12, such as, e.g., a conservative BoNT/C1 translocation domain variant, a non-conservative BoNT/C1 translocation domain variant, an active BoNT/C1 translocation domain fragment, or any combination thereof. In still another aspect of this embodiment, a BoNT/C1 translocation domain comprises amino acids 454-868 of a non-naturally occurring BoNT/C1 translocation domain variant of SEQ ID NO: 11, such as, e.g., a conservative BoNT/C1 translocation domain variant, a non-conservative BoNT/C1 translocation domain variant, an active BoNT/C1 translocation domain fragment, or any combination thereof.

[0097] In other aspects of this embodiment, a BoNT/C1 translocation domain comprises a polypeptide having an amino acid identity of, e.g., at least 70%, at least 75%, at least 80%, at least 85%, at least 90%, or at least 95% to the translocation domain of SEQ ID NO: 11 or SEQ ID NO: 12; or at most 70%, at most 75%, at most 80%, at most 85%, at most 90%, or at most 95% to the translocation domain of SEQ ID NO: 11 or SEQ ID NO: 12. In yet other aspects of this embodiment, a BoNT/C1 translocation domain comprises a polypeptide having an amino acid identity of, e.g., at least 70%, at least 75%, at least 80%, at least 85%, at least 90%, or at least 95% to amino acids 454-868 of SEQ ID NO: 11; or at most 70%, at most 75%, at most 80%, at most 85%, at most 90%, or at most 95% to amino acids 454-868 of SEQ ID NO: 11.

[0098] In other aspects of this embodiment, a BoNT/C1 translocation domain comprises a polypeptide having, e.g., at most 1, 2, 3, 4, 5, 6, 7, 8, 9, 10, 20, 30, 40, 50, or 100 non-contiguous amino acid deletions, additions, and/or substitutions relative to the translocation domain of SEQ ID NO: 11 or SEQ ID NO: 12; or at most 1, 2, 3, 4, 5, 6, 7, 8, 9, 10, 20, 30, 40, 50, or 100 non-contiguous amino acid deletions, additions, and/or substitutions relative to the translocation domain of SEQ ID NO: 11 or SEQ ID NO: 12. In yet other aspects of this embodiment, a BoNT/C1 translocation domain comprises a polypeptide having, e.g., at most 1, 2, 3, 4, 5, 6, 7, 8, 9, 10, 20, 30, 40, 50, or 100 non-contiguous amino acid deletions, additions, and/or substitutions relative to amino acids 454-868 of SEQ ID NO: 11; or at most 1, 2, 3, 4, 5, 6, 7, 8, 9, 10, 20, 30, 40, 50, or 100 non-contiguous amino acid deletions, additions, and/or substitutions relative to amino acids 454-868 of SEQ ID NO: 11. In still other aspects of this embodiment, a BoNT/C1 translocation domain comprises a polypeptide having, e.g., at least 1, 2, 3, 4, 5, 6, 7, 8, 9, 10, 20, 30, 40, 50, or 100 contiguous amino acid deletions, additions, and/or substitutions relative to the translocation domain of SEQ ID NO: 11 or SEQ ID NO: 12; or at most 1, 2, 3, 4, 5, 6, 7, 8, 9, 10, 20, 30, 40, 50, or 100 contiguous amino acid deletions, additions, and/or substitutions relative to the translocation domain of SEQ ID NO: 11 or SEQ ID NO: 12. In further other aspects of this embodiment, a BoNT/C1 translocation domain comprises a polypeptide having, e.g., at least 1, 2, 3, 4, 5, 6, 7, 8, 9, 10, 20, 30, 40, 50, or 100 contiguous amino acid deletions, additions, and/or substitutions relative to amino acids 454-868 of SEQ ID NO: 11; or at most 1, 2, 3, 4, 5, 6, 7, 8, 9, 10, 20, 30, 40, 50, or 100 contiguous amino acid deletions, additions, and/or substitutions relative to amino acids 454-868 of SEQ ID NO: 11.

[0099] In another embodiment, a Clostridial toxin translocation domain comprises a BoNT/D translocation domain. In an aspect of this embodiment, a BoNT/D translocation domain comprises the translocation domains of SEQ ID NO: 13 or SEQ ID NO: 14. In other aspects of this embodiment, a BoNT/D translocation domain comprises amino acids 451-864 of SEQ ID NO: 13. In another aspect of this embodiment, a BoNT/D translocation domain comprises a naturally occurring BoNT/D translocation domain variant, such as, e.g., an translocation domain from a BoNT/D isoform or an translocation domain from a BoNT/D subtype. In another aspect of this embodiment, a BoNT/D translocation domain comprises a naturally occurring BoNT/D translocation domain variant of SEQ ID NO: 13 or SEQ ID NO: 14, such as, e.g., a BoNT/D isoform translocation domain or a BoNT/D subtype translocation domain. In another aspect of this embodiment, a BoNT/D translocation domain comprises amino acids 451-864 of a naturally occurring BoNT/D translocation domain variant of SEQ ID NO: 13, such as, e.g., a BoNT/D isoform translocation domain or a BoNT/D subtype translocation domain. In still another aspect of this embodiment, a BoNT/D translocation domain comprises a non-naturally occurring BoNT/D translocation domain variant, such as, e.g., a conservative BoNT/D translocation domain variant, a non-conservative BoNT/D translocation domain variant, an active BoNT/D translocation domain fragment, or any combination thereof. In still another aspect of this embodiment, a BoNT/D translocation domain comprises the translocation domain of a non-naturally occurring BoNT/D translocation domain variant of SEQ ID NO: 13 or SEQ ID NO: 14, such as, e.g., a conservative BoNT/D translocation domain variant, a non-conservative BoNT/D translocation domain variant, an active BoNT/D translocation domain fragment, or any combination thereof. In still another aspect of this embodiment, a BoNT/D translocation domain comprises amino acids 451-864 of a non-naturally occurring BoNT/D translocation domain variant of SEQ ID NO: 13, such as, e.g., a conservative BoNT/D translocation domain variant, a non-conservative BoNT/D translocation domain variant, an active BoNT/D translocation domain fragment, or any combination thereof.

[0100] In other aspects of this embodiment, a BoNT/D translocation domain comprises a polypeptide having an amino acid identity of, e.g., at least 70%, at least 75%, at least 80%, at least 85%, at least 90%, or at least 95% to the translocation domain of SEQ ID NO: 13 or SEQ ID NO: 14; or at most 70%, at most 75%, at most 80%, at most 85%, at most 90%, or at most 95% to the translocation domain of SEQ ID NO: 13 or SEQ ID NO: 14. In yet other aspects of this embodiment, a BoNT/D translocation domain comprises a polypeptide having an amino acid identity of, e.g., at least 70%, at least 75%, at least 80%, at least 85%, at least 90%, or at least 95% to amino acids 451-864 of SEQ ID NO: 13; or at most 70%, at most 75%, at most 80%, at most 85%, at most 90%, or at most 95% to amino acids 451-864 of SEQ ID NO: 13.

[0101] In other aspects of this embodiment, a BoNT/D translocation domain comprises a polypeptide having, e.g., at most 1, 2, 3, 4, 5, 6, 7, 8, 9, 10, 20, 30, 40, 50, or 100 non-contiguous amino acid deletions, additions, and/or substitutions relative to the translocation domain of SEQ ID NO: 13 or SEQ ID NO: 14; or at most 1, 2, 3, 4, 5, 6, 7, 8, 9, 10, 20, 30, 40, 50, or 100 non-contiguous amino acid deletions, additions, and/or substitutions relative to the translocation domain of SEQ ID NO: 13 or SEQ ID NO: 14. In yet other aspects of this embodiment, a BoNT/D translocation domain comprises a polypeptide having, e.g., at most 1, 2, 3, 4, 5, 6, 7, 8, 9, 10, 20, 30, 40, 50, or 100 non-contiguous amino acid deletions, additions, and/or substitutions relative to amino acids 451-864 of SEQ ID NO: 13; or at most 1, 2, 3, 4, 5, 6, 7, 8, 9, 10, 20, 30, 40, 50, or 100 non-contiguous amino acid deletions, additions, and/or substitutions relative to amino acids 451-864 of SEQ ID NO: 13. In still other aspects of this embodiment, a BoNT/D translocation domain comprises a polypeptide having, e.g., at least 1, 2, 3, 4, 5, 6, 7, 8, 9, 10, 20, 30, 40, 50, or 100 contiguous amino acid deletions, additions, and/or substitutions relative to the translocation domain of SEQ ID NO: 13 or SEQ ID NO: 14; or at most 1, 2, 3, 4, 5, 6, 7, 8, 9, 10, 20, 30, 40, 50, or 100 contiguous amino acid deletions, additions, and/or substitutions relative to the translocation domain of SEQ ID NO: 13 or SEQ ID NO: 14. In further other aspects of this embodiment, a BoNT/D translocation domain comprises a polypeptide having, e.g., at least 1, 2, 3, 4, 5, 6, 7, 8, 9, 10, 20, 30, 40, 50, or 100 contiguous amino acid deletions, additions, and/or substitutions relative to amino acids 451-864 of SEQ ID NO: 13; or at most 1, 2, 3, 4, 5, 6, 7, 8, 9, 10, 20, 30, 40, 50, or 100 contiguous amino acid deletions, additions, and/or substitutions relative to amino acids 451-864 of SEQ ID NO: 13.

[0102] In another embodiment, a Clostridial toxin translocation domain comprises a BoNT/E translocation domain. In an aspect of this embodiment, a BoNT/E translocation domain comprises the translocation domains of SEQ ID NO: 15, SEQ ID NO: 16, or SEQ ID NO: 17. In other aspects of this embodiment, a BoNT/E translocation domain comprises amino acids 427-847 of SEQ ID NO: 15. In another aspect of this embodiment, a BoNT/E translocation domain comprises a naturally occurring BoNT/E translocation domain variant, such as, e.g., an translocation domain from a BoNT/E isoform or an translocation domain from a BoNT/E subtype. In another aspect of this embodiment, a BoNT/E translocation domain comprises a naturally occurring BoNT/E translocation domain variant of SEQ ID NO: 15, SEQ ID NO: 16, or SEQ ID NO: 17, such as, e.g., a BoNT/E isoform translocation domain or a BoNT/E subtype translocation domain. In another aspect of this embodiment, a BoNT/E translocation domain comprises amino acids 427-847 of a naturally occurring BoNT/E translocation domain variant of SEQ ID NO: 15, such as, e.g., a BoNT/E isoform translocation domain or a BoNT/E subtype translocation domain. In still another aspect of this embodiment, a BoNT/E translocation domain comprises a non-naturally occurring BoNT/E translocation domain variant, such as, e.g., a conservative BoNT/E translocation domain variant, a non-conservative BoNT/E translocation domain variant, an active BoNT/E translocation domain fragment, or any combination thereof. In still another aspect of this embodiment, a BoNT/E translocation domain comprises the translocation domain of a non-naturally occurring BoNT/E translocation domain variant of SEQ ID NO: 15, SEQ ID NO: 16, or SEQ ID NO: 17, such as, e.g., a conservative BoNT/E translocation domain variant, a non-conservative BoNT/E translocation domain variant, an active BoNT/E translocation domain fragment, or any combination thereof. In still another aspect of this embodiment, a BoNT/E translocation domain comprises amino acids 427-847 of a non-naturally occurring BoNT/E translocation domain variant of SEQ ID NO: 15, such as, e.g., a conservative BoNT/E translocation domain variant, a non-conservative BoNT/E translocation domain variant, an active BoNT/E translocation domain fragment, or any combination thereof.

[0103] In other aspects of this embodiment, a BoNT/E translocation domain comprises a polypeptide having an amino acid identity of, e.g., at least 70%, at least 75%, at least 80%, at least 85%, at least 90%, or at least 95% to the translocation domain of SEQ ID NO: 15, SEQ ID NO: 16, or SEQ ID NO: 17; or at most 70%, at most 75%, at most 80%, at most 85%, at most 90%, or at most 95% to the translocation domain of SEQ ID NO: 15, SEQ ID NO: 16, or SEQ ID NO: 17. In yet other aspects of this embodiment, a BoNT/E translocation domain comprises a polypeptide having an amino acid identity of, e.g., at least 70%, at least 75%, at least 80%, at least 85%, at least 90%, or at least 95% to amino acids 427-847 of SEQ ID NO: 15; or at most 70%, at most 75%, at most 80%, at most 85%, at most 90%, or at most 95% to amino acids 427-847 of SEQ ID NO: 15.

[0104] In other aspects of this embodiment, a BoNT/E translocation domain comprises a polypeptide having, e.g., at most 1, 2, 3, 4, 5, 6, 7, 8, 9, 10, 20, 30, 40, 50, or 100 non-contiguous amino acid deletions, additions, and/or substitutions relative to the translocation domain of SEQ ID NO: 15, SEQ ID NO: 16, or SEQ ID NO: 17; or at most 1, 2, 3, 4, 5, 6, 7, 8, 9, 10, 20, 30, 40, 50, or 100 non-contiguous amino acid deletions, additions, and/or substitutions relative to the translocation domain of SEQ ID NO: 15, SEQ ID NO: 16, or SEQ ID NO: 17. In yet other aspects of this embodiment, a BoNT/E translocation domain comprises a polypeptide having, e.g., at most 1, 2, 3, 4, 5, 6, 7, 8, 9, 10, 20, 30, 40, 50, or 100 non-contiguous amino acid deletions, additions, and/or substitutions relative to amino acids 427-847 of SEQ ID NO: 15; or at most 1, 2, 3, 4, 5, 6, 7, 8, 9, 10, 20, 30, 40, 50, or 100 non-contiguous amino acid deletions, additions, and/or substitutions relative to amino acids 427-847 of SEQ ID NO: 15. In still other aspects of this embodiment, a BoNT/E translocation domain comprises a polypeptide having, e.g., at least 1, 2, 3, 4, 5, 6, 7, 8, 9, 10, 20, 30, 40, 50, or 100 contiguous amino acid deletions, additions, and/or substitutions relative to the translocation domain of SEQ ID NO: 15, SEQ ID NO: 16, or SEQ ID NO: 17; or at most 1, 2, 3, 4, 5, 6, 7, 8, 9, 10, 20, 30, 40, 50, or 100 contiguous amino acid deletions, additions, and/or substitutions relative to the translocation domain of SEQ ID NO: 15, SEQ ID NO: 16, or SEQ ID NO: 17. In further other aspects of this embodiment, a BoNT/E translocation domain comprises a polypeptide having, e.g., at least 1, 2, 3, 4, 5, 6, 7, 8, 9, 10, 20, 30, 40, 50, or 100 contiguous amino acid deletions, additions, and/or substitutions relative to amino acids 427-847 of SEQ ID NO: 15; or at most 1, 2, 3, 4, 5, 6, 7, 8, 9, 10, 20, 30, 40, 50, or 100 contiguous amino acid deletions, additions, and/or substitutions relative to amino acids 427-847 of SEQ ID NO: 15.

[0105] In another embodiment, a Clostridial toxin translocation domain comprises a BoNT/F translocation domain. In an aspect of this embodiment, a BoNT/F translocation domain comprises the translocation domains of SEQ ID NO: 18, SEQ ID NO: 19, or SEQ ID NO: 20. In other aspects of this embodiment, a BoNT/F translocation domain comprises amino acids 446-865 of SEQ ID NO: 18. In another aspect of this embodiment, a BoNT/F translocation domain comprises a naturally occurring BoNT/F translocation domain variant, such as, e.g., an translocation domain from a BoNT/F isoform or an translocation domain from a BoNT/F subtype. In another aspect of this embodiment, a BoNT/F translocation domain comprises a naturally occurring BoNT/F translocation domain variant of SEQ ID NO: 18, SEQ ID NO: 19, or SEQ ID NO: 20, such as, e.g., a BoNT/F isoform translocation domain or a BoNT/F subtype translocation domain. In another aspect of this embodiment, a BoNT/F translocation domain comprises amino acids 446-865 of a naturally occurring BoNT/F translocation domain variant of SEQ ID NO: 18, such as, e.g., a BoNT/F isoform translocation domain or a BoNT/F subtype translocation domain. In still another aspect of this embodiment, a BoNT/F translocation domain comprises a non-naturally occurring BoNT/F translocation domain variant, such as, e.g., a conservative BoNT/F translocation domain variant, a non-conservative BoNT/F translocation domain variant, an active BoNT/F translocation domain fragment, or any combination thereof. In still another aspect of this embodiment, a BoNT/F translocation domain comprises the translocation domain of a non-naturally occurring BoNT/F translocation domain variant of SEQ ID NO: 18, SEQ ID NO: 19, or SEQ ID NO: 20, such as, e.g., a conservative BoNT/F translocation domain variant, a non-conservative BoNT/F translocation domain variant, an active BoNT/F translocation domain fragment, or any combination thereof. In still another aspect of this embodiment, a BoNT/F translocation domain comprises amino acids 446-865 of a non-naturally occurring BoNT/F translocation domain variant of SEQ ID NO: 18, such as, e.g., a conservative BoNT/F translocation domain variant, a non-conservative BoNT/F translocation domain variant, an active BoNT/F translocation domain fragment, or any combination thereof.

[0106] In other aspects of this embodiment, a BoNT/F translocation domain comprises a polypeptide having an amino acid identity of, e.g., at least 70%, at least 75%, at least 80%, at least 85%, at least 90%, or at least 95% to the translocation domain of SEQ ID NO: 18, SEQ ID NO: 19, or SEQ ID NO: 20; or at most 70%, at most 75%, at most 80%, at most 85%, at most 90%, or at most 95% to the translocation domain of SEQ ID NO: 18, SEQ ID NO: 19, or SEQ ID NO: 20. In yet other aspects of this embodiment, a BoNT/F translocation domain comprises a polypeptide having an amino acid identity of, e.g., at least 70%, at least 75%, at least 80%, at least 85%, at least 90%, or at least 95% to amino acids 446-865 of SEQ ID NO: 18; or at most 70%, at most 75%, at most 80%, at most 85%, at most 90%, or at most 95% to amino acids 446-865 of SEQ ID NO: 18.

[0107] In other aspects of this embodiment, a BoNT/F translocation domain comprises a polypeptide having, e.g., at most 1, 2, 3, 4, 5, 6, 7, 8, 9, 10, 20, 30, 40, 50, or 100 non-contiguous amino acid deletions, additions, and/or substitutions relative to the translocation domain of SEQ ID NO: 18, SEQ ID NO: 19, or SEQ ID NO: 20; or at most 1, 2, 3, 4, 5, 6, 7, 8, 9, 10, 20, 30, 40, 50, or 100 non-contiguous amino acid deletions, additions, and/or substitutions relative to the translocation domain of SEQ ID NO: 18, SEQ ID NO: 19, or SEQ ID NO: 20. In yet other aspects of this embodiment, a BoNT/F translocation domain comprises a polypeptide having, e.g., at most 1, 2, 3, 4, 5, 6, 7, 8, 9, 10, 20, 30, 40, 50, or 100 non-contiguous amino acid deletions, additions, and/or substitutions relative to amino acids 446-865 of SEQ ID NO: 18; or at most 1, 2, 3, 4, 5, 6, 7, 8, 9, 10, 20, 30, 40, 50, or 100 non-contiguous amino acid deletions, additions, and/or substitutions relative to amino acids 446-865 of SEQ ID NO: 18. In still other aspects of this embodiment, a BoNT/F translocation domain comprises a polypeptide having, e.g., at least 1, 2, 3, 4, 5, 6, 7, 8, 9, 10, 20, 30, 40, 50, or 100 contiguous amino acid deletions, additions, and/or substitutions relative to the translocation domain of SEQ ID NO: 18, SEQ ID NO: 19, or SEQ ID NO: 20; or at most 1, 2, 3, 4, 5, 6, 7, 8, 9, 10, 20, 30, 40, 50, or 100 contiguous amino acid deletions, additions, and/or substitutions relative to the translocation domain of SEQ ID NO: 18, SEQ ID NO: 19, or SEQ ID NO: 20. In further other aspects of this embodiment, a BoNT/F translocation domain comprises a polypeptide having, e.g., at least 1, 2, 3, 4, 5, 6, 7, 8, 9, 10, 20, 30, 40, 50, or 100 contiguous amino acid deletions, additions, and/or substitutions relative to amino acids 446-865 of SEQ ID NO: 18; or at most 1, 2, 3, 4, 5, 6, 7, 8, 9, 10, 20, 30, 40, 50, or 100 contiguous amino acid deletions, additions, and/or substitutions relative to amino acids 446-865 of SEQ ID NO: 18.

[0108] In another embodiment, a Clostridial toxin translocation domain comprises a BoNT/G translocation domain. In an aspect of this embodiment, a BoNT/G translocation domain comprises the translocation domains of SEQ ID NO: 21. In other aspects of this embodiment, a BoNT/G translocation domain comprises amino acids 451-865 of SEQ ID NO: 21. In another aspect of this embodiment, a BoNT/G translocation domain comprises a naturally occurring BoNT/G translocation domain variant, such as, e.g., an translocation domain from a BoNT/G isoform or an translocation domain from a BoNT/G subtype. In another aspect of this embodiment, a BoNT/G translocation domain comprises a naturally occurring BoNT/G translocation domain variant of SEQ ID NO: 21, such as, e.g., a BoNT/G isoform translocation domain or a BoNT/G subtype translocation domain. In another aspect of this embodiment, a BoNT/G translocation domain comprises amino acids 451-865 of a naturally occurring BoNT/G translocation domain variant of SEQ ID NO: 21, such as, e.g., a BoNT/G isoform translocation domain or a BoNT/G subtype translocation domain. In still another aspect of this embodiment, a BoNT/G translocation domain comprises a non-naturally occurring BoNT/G translocation domain variant, such as, e.g., a conservative BoNT/G translocation domain variant, a non-conservative BoNT/G translocation domain variant, an active BoNT/G translocation domain fragment, or any combination thereof. In still another aspect of this embodiment, a BoNT/G translocation domain comprises the translocation domain of a non-naturally occurring BoNT/G translocation domain variant of SEQ ID NO: 21, such as, e.g., a conservative BoNT/G translocation domain variant, a non-conservative BoNT/G translocation domain variant, an active BoNT/G translocation domain fragment, or any combination thereof. In still another aspect of this embodiment, a BoNT/G translocation domain comprises amino acids 451-865 of a non-naturally occurring BoNT/G translocation domain variant of SEQ ID NO: 21, such as, e.g., a conservative BoNT/G translocation domain variant, a non-conservative BoNT/G translocation domain variant, an active BoNT/G translocation domain fragment, or any combination thereof.

[0109] In other aspects of this embodiment, a BoNT/G translocation domain comprises a polypeptide having an amino acid identity of, e.g., at least 70%, at least 75%, at least 80%, at least 85%, at least 90%, or at least 95% to the translocation domain of SEQ ID NO: 21; or at most 70%, at most 75%, at most 80%, at most 85%, at most 90%, or at most 95% to the translocation domain of SEQ ID NO: 21. In yet other aspects of this embodiment, a BoNT/G translocation domain comprises a polypeptide having an amino acid identity of, e.g., at least 70%, at least 75%, at least 80%, at least 85%, at least 90%, or at least 95% to amino acids 451-865 of SEQ ID NO: 21; or at most 70%, at most 75%, at most 80%, at most 85%, at most 90%, or at most 95% to amino acids 451-865 of SEQ ID NO: 21.

[0110] In other aspects of this embodiment, a BoNT/G translocation domain comprises a polypeptide having, e.g., at most 1, 2, 3, 4, 5, 6, 7, 8, 9, 10, 20, 30, 40, 50, or 100 non-contiguous amino acid deletions, additions, and/or substitutions relative to the translocation domain of SEQ ID NO: 21; or at most 1, 2, 3, 4, 5, 6, 7, 8, 9, 10, 20, 30, 40, 50, or 100 non-contiguous amino acid deletions, additions, and/or substitutions relative to the translocation domain of SEQ ID NO: 21. In yet other aspects of this embodiment, a BoNT/G translocation domain comprises a polypeptide having, e.g., at most 1, 2, 3, 4, 5, 6, 7, 8, 9, 10, 20, 30, 40, 50, or 100 non-contiguous amino acid deletions, additions, and/or substitutions relative to amino acids 451-865 of SEQ ID NO: 21; or at most 1, 2, 3, 4, 5, 6, 7, 8, 9, 10, 20, 30, 40, 50, or 100 non-contiguous amino acid deletions, additions, and/or substitutions relative to amino acids 451-865 of SEQ ID NO: 21. In still other aspects of this embodiment, a BoNT/G translocation domain comprises a polypeptide having, e.g., at least 1, 2, 3, 4, 5, 6, 7, 8, 9, 10, 20, 30, 40, 50, or 100 contiguous amino acid deletions, additions, and/or substitutions relative to the translocation domain of SEQ ID NO: 21; or at most 1, 2, 3, 4, 5, 6, 7, 8, 9, 10, 20, 30, 40, 50, or 100 contiguous amino acid deletions, additions, and/or substitutions relative to the translocation domain of SEQ ID NO: 21. In further other aspects of this embodiment, a BoNT/G translocation domain comprises a polypeptide having, e.g., at least 1, 2, 3, 4, 5, 6, 7, 8, 9, 10, 20, 30, 40, 50, or 100 contiguous amino acid deletions, additions, and/or substitutions relative to amino acids 451-865 of SEQ ID NO: 21; or at most 1, 2, 3, 4, 5, 6, 7, 8, 9, 10, 20, 30, 40, 50, or 100 contiguous amino acid deletions, additions, and/or substitutions relative to amino acids 451-865 of SEQ ID NO: 21.

[0111] In another embodiment, a Clostridial toxin translocation domain comprises a TeNT translocation domain. In an aspect of this embodiment, a TeNT translocation domain comprises the translocation domains of SEQ ID NO: 22. In other aspects of this embodiment, a TeNT translocation domain comprises amino acids 468-881 of SEQ ID NO: 22. In another aspect of this embodiment, a TeNT translocation domain comprises a naturally occurring TeNT translocation domain variant, such as, e.g., an translocation domain from a TeNT isoform or an translocation domain from a TeNT subtype. In another aspect of this embodiment, a TeNT translocation domain comprises a naturally occurring TeNT translocation domain variant of SEQ ID NO: 22, such as, e.g., a TeNT isoform translocation domain or a TeNT subtype translocation domain. In another aspect of this embodiment, a TeNT translocation domain comprises amino acids 468-881 of a naturally occurring TeNT translocation domain variant of SEQ ID NO: 22, such as, e.g., a TeNT isoform translocation domain or a TeNT subtype translocation domain. In still another aspect of this embodiment, a TeNT translocation domain comprises a non-naturally occurring TeNT translocation domain variant, such as, e.g., a conservative TeNT translocation domain variant, a non-conservative TeNT translocation domain variant, an active TeNT translocation domain fragment, or any combination thereof. In still another aspect of this embodiment, a TeNT translocation domain comprises the translocation domain of a non-naturally occurring TeNT translocation domain variant of SEQ ID NO: 22, such as, e.g., a conservative TeNT translocation domain variant, a non-conservative TeNT translocation domain variant, an active TeNT translocation domain fragment, or any combination thereof. In still another aspect of this embodiment, a TeNT translocation domain comprises amino acids 468-881 of a non-naturally occurring TeNT translocation domain variant of SEQ ID NO: 22, such as, e.g., a conservative TeNT translocation domain variant, a non-conservative TeNT translocation domain variant, an active TeNT translocation domain fragment, or any combination thereof.

[0112] In other aspects of this embodiment, a TeNT translocation domain comprises a polypeptide having an amino acid identity of, e.g., at least 70%, at least 75%, at least 80%, at least 85%, at least 90%, or at least 95% to the translocation domain of SEQ ID NO: 22; or at most 70%, at most 75%, at most 80%, at most 85%, at most 90%, or at most 95% to the translocation domain of SEQ ID NO: 22. In yet other aspects of this embodiment, a TeNT translocation domain comprises a polypeptide having an amino acid identity of, e.g., at least 70%, at least 75%, at least 80%, at least 85%, at least 90%, or at least 95% to amino acids 468-881 of SEQ ID NO: 22; or at most 70%, at most 75%, at most 80%, at most 85%, at most 90%, or at most 95% to amino acids 468-881 of SEQ ID NO: 22.

[0113] In other aspects of this embodiment, a TeNT translocation domain comprises a polypeptide having, e.g., at most 1, 2, 3, 4, 5, 6, 7, 8, 9, 10, 20, 30, 40, 50, or 100 non-contiguous amino acid deletions, additions, and/or substitutions relative to the translocation domain of SEQ ID NO: 22; or at most 1, 2, 3, 4, 5, 6, 7, 8, 9, 10, 20, 30, 40, 50, or 100 non-contiguous amino acid deletions, additions, and/or substitutions relative to the translocation domain of SEQ ID NO: 22. In yet other aspects of this embodiment, a TeNT translocation domain comprises a polypeptide having, e.g., at most 1, 2, 3, 4, 5, 6, 7, 8, 9, 10, 20, 30, 40, 50, or 100 non-contiguous amino acid deletions, additions, and/or substitutions relative to amino acids 468-881 of SEQ ID NO: 22; or at most 1, 2, 3, 4, 5, 6, 7, 8, 9, 10, 20, 30, 40, 50, or 100 non-contiguous amino acid deletions, additions, and/or substitutions relative to amino acids 468-881 of SEQ ID NO: 22. In still other aspects of this embodiment, a TeNT translocation domain comprises a polypeptide having, e.g., at least 1, 2, 3, 4, 5, 6, 7, 8, 9, 10, 20, 30, 40, 50, or 100 contiguous amino acid deletions, additions, and/or substitutions relative to the translocation domain of SEQ ID NO: 22; or at most 1, 2, 3, 4, 5, 6, 7, 8, 9, 10, 20, 30, 40, 50, or 100 contiguous amino acid deletions, additions, and/or substitutions relative to the translocation domain of SEQ ID NO: 22. In further other aspects of this embodiment, a TeNT translocation domain comprises a polypeptide having, e.g., at least 1, 2, 3, 4, 5, 6, 7, 8, 9, 10, 20, 30, 40, 50, or 100 contiguous amino acid deletions, additions, and/or substitutions relative to amino acids 468-881 of SEQ ID NO: 22; or at most 1, 2, 3, 4, 5, 6, 7, 8, 9, 10, 20, 30, 40, 50, or 100 contiguous amino acid deletions, additions, and/or substitutions relative to amino acids 468-881 of SEQ ID NO: 22.

[0114] In another embodiment, a Clostridial toxin translocation domain comprises a BaNT translocation domain. In an aspect of this embodiment, a BaNT translocation domain comprises the translocation domains of SEQ ID NO: 23. In other aspects of this embodiment, a BaNT translocation domain comprises amino acids 436-857 of SEQ ID NO: 23. In another aspect of this embodiment, a BaNT translocation domain comprises a naturally occurring BaNT translocation domain variant, such as, e.g., an translocation domain from a BaNT isoform or an translocation domain from a BaNT subtype. In another aspect of this embodiment, a BaNT translocation domain comprises a naturally occurring BaNT translocation domain variant of SEQ ID NO: 23, such as, e.g., a BaNT isoform translocation domain or a BaNT subtype translocation domain. In another aspect of this embodiment, a BaNT translocation domain comprises amino acids 436-857 of a naturally occurring BaNT translocation domain variant of SEQ ID NO: 23, such as, e.g., a BaNT isoform translocation domain or a BaNT subtype translocation domain. In still another aspect of this embodiment, a BaNT translocation domain comprises a non-naturally occurring BaNT translocation domain variant, such as, e.g., a conservative BaNT translocation domain variant, a non-conservative BaNT translocation domain variant, an active BaNT translocation domain fragment, or any combination thereof. In still another aspect of this embodiment, a BaNT translocation domain comprises the translocation domain of a non-naturally occurring BaNT translocation domain variant of SEQ ID NO: 23, such as, e.g., a conservative BaNT translocation domain variant, a non-conservative BaNT translocation domain variant, an active BaNT translocation domain fragment, or any combination thereof. In still another aspect of this embodiment, a BaNT translocation domain comprises amino acids 436-857 of a non-naturally occurring BaNT translocation domain variant of SEQ ID NO: 23, such as, e.g., a conservative BaNT translocation domain variant, a non-conservative BaNT translocation domain variant, an active BaNT translocation domain fragment, or any combination thereof.

[0115] In other aspects of this embodiment, a BaNT translocation domain comprises a polypeptide having an amino acid identity of, e.g., at least 70%, at least 75%, at least 80%, at least 85%, at least 90%, or at least 95% to the translocation domain of SEQ ID NO: 23; or at most 70%, at most 75%, at most 80%, at most 85%, at most 90%, or at most 95% to the translocation domain of SEQ ID NO: 23. In yet other aspects of this embodiment, a BaNT translocation domain comprises a polypeptide having an amino acid identity of, e.g., at least 70%, at least 75%, at least 80%, at least 85%, at least 90%, or at least 95% to amino acids 436-857 of SEQ ID NO: 23; or at most 70%, at most 75%, at most 80%, at most 85%, at most 90%, or at most 95% to amino acids 436-857 of SEQ ID NO: 23.

[0116] In other aspects of this embodiment, a BaNT translocation domain comprises a polypeptide having, e.g., at most 1, 2, 3, 4, 5, 6, 7, 8, 9, 10, 20, 30, 40, 50, or 100 non-contiguous amino acid deletions, additions, and/or substitutions relative to the translocation domain of SEQ ID NO: 23; or at most 1, 2, 3, 4, 5, 6, 7, 8, 9, 10, 20, 30, 40, 50, or 100 non-contiguous amino acid deletions, additions, and/or substitutions relative to the translocation domain of SEQ ID NO: 23. In yet other aspects of this embodiment, a BaNT translocation domain comprises a polypeptide having, e.g., at most 1, 2, 3, 4, 5, 6, 7, 8, 9, 10, 20, 30, 40, 50, or 100 non-contiguous amino acid deletions, additions, and/or substitutions relative to amino acids 436-857 of SEQ ID NO: 23; or at most 1, 2, 3, 4, 5, 6, 7, 8, 9, 10, 20, 30, 40, 50, or 100 non-contiguous amino acid deletions, additions, and/or substitutions relative to amino acids 436-857 of SEQ ID NO: 23. In still other aspects of this embodiment, a BaNT translocation domain comprises a polypeptide having, e.g., at least 1, 2, 3, 4, 5, 6, 7, 8, 9, 10, 20, 30, 40, 50, or 100 contiguous amino acid deletions, additions, and/or substitutions relative to the translocation domain of SEQ ID NO: 23; or at most 1, 2, 3, 4, 5, 6, 7, 8, 9, 10, 20, 30, 40, 50, or 100 contiguous amino acid deletions, additions, and/or substitutions relative to the translocation domain of SEQ ID NO: 23. In further other aspects of this embodiment, a BaNT translocation domain comprises a polypeptide having, e.g., at least 1, 2, 3, 4, 5, 6, 7, 8, 9, 10, 20, 30, 40, 50, or 100 contiguous amino acid deletions, additions, and/or substitutions relative to amino acids 436-857 of SEQ ID NO: 23; or at most 1, 2, 3, 4, 5, 6, 7, 8, 9, 10, 20, 30, 40, 50, or 100 contiguous amino acid deletions, additions, and/or substitutions relative to amino acids 436-857 of SEQ ID NO: 23.

[0117] In another embodiment, a Clostridial toxin translocation domain comprises a BuNT translocation domain. In an aspect of this embodiment, a BuNT translocation domain comprises the translocation domains of SEQ ID NO: 24 or SEQ ID NO: 25. In other aspects of this embodiment, a BuNT translocation domain comprises amino acids 427-847 of SEQ ID NO: 24. In another aspect of this embodiment, a BuNT translocation domain comprises a naturally occurring BuNT translocation domain variant, such as, e.g., a translocation domain from a BuNT isoform or an translocation domain from a BuNT subtype. In another aspect of this embodiment, a BuNT translocation domain comprises a naturally occurring BuNT translocation domain variant of SEQ ID NO: 24 or SEQ ID NO: 25, such as, e.g., a BuNT isoform translocation domain or a BuNT subtype translocation domain. In another aspect of this embodiment, a BuNT translocation domain comprises amino acids 427-847 of a naturally occurring BuNT translocation domain variant of SEQ ID NO: 24, such as, e.g., a BuNT isoform translocation domain or a BuNT subtype translocation domain. In still another aspect of this embodiment, a BuNT translocation domain comprises a non-naturally occurring BuNT translocation domain variant, such as, e.g., a conservative BuNT translocation domain variant, a non-conservative BuNT translocation domain variant, an active BuNT translocation domain fragment, or any combination thereof. In still another aspect of this embodiment, a BuNT translocation domain comprises the translocation domain of a non-naturally occurring BuNT translocation domain variant of SEQ ID NO: 24 or SEQ ID NO: 25, such as, e.g., a conservative BuNT translocation domain variant, a non-conservative BuNT translocation domain variant, an active BuNT translocation domain fragment, or any combination thereof. In still another aspect of this embodiment, a BuNT translocation domain comprises amino acids 427-847 of a non-naturally occurring BuNT translocation domain variant of SEQ ID NO: 24, such as, e.g., a conservative BuNT translocation domain variant, a non-conservative BuNT translocation domain variant, an active BuNT translocation domain fragment, or any combination thereof.

[0118] In other aspects of this embodiment, a BuNT translocation domain comprises a polypeptide having an amino acid identity of, e.g., at least 70%, at least 75%, at least 80%, at least 85%, at least 90%, or at least 95% to the translocation domain of SEQ ID NO: 24 or SEQ ID NO: 25; or at most 70%, at most 75%, at most 80%, at most 85%, at most 90%, or at most 95% to the translocation domain of SEQ ID NO: 24 or SEQ ID NO: 25. In yet other aspects of this embodiment, a BuNT translocation domain comprises a polypeptide having an amino acid identity of, e.g., at least 70%, at least 75%, at least 80%, at least 85%, at least 90%, or at least 95% to amino acids 427-847 of SEQ ID NO: 24 or SEQ ID NO: 25; or at most 70%, at most 75%, at most 80%, at most 85%, at most 90%, or at most 95% to amino acids 427-847 of SEQ ID NO: 24 or SEQ ID NO: 25.

[0119] In other aspects of this embodiment, a BuNT translocation domain comprises a polypeptide having, e.g., at most 1, 2, 3, 4, 5, 6, 7, 8, 9, 10, 20, 30, 40, 50, or 100 non-contiguous amino acid deletions, additions, and/or substitutions relative to the translocation domain of SEQ ID NO: 24 or SEQ ID NO: 25; or at most 1, 2, 3, 4, 5, 6, 7, 8, 9, 10, 20, 30, 40, 50, or 100 non-contiguous amino acid deletions, additions, and/or substitutions relative to the translocation domain of SEQ ID NO: 24 OR SEQ ID NO: 25. In yet other aspects of this embodiment, a BuNT translocation domain comprises a polypeptide having, e.g., at most 1, 2, 3, 4, 5, 6, 7, 8, 9, 10, 20, 30, 40, 50, or 100 non-contiguous amino acid deletions, additions, and/or substitutions relative to amino acids 427-847 of SEQ ID NO: 24 or SEQ ID NO: 25; or at most 1, 2, 3, 4, 5, 6, 7, 8, 9, 10, 20, 30, 40, 50, or 100 non-contiguous amino acid deletions, additions, and/or substitutions relative to amino acids 427-847 of SEQ ID NO: 24 or SEQ ID NO: 25. In still other aspects of this embodiment, a BuNT translocation domain comprises a polypeptide having, e.g., at least 1, 2, 3, 4, 5, 6, 7, 8, 9, 10, 20, 30, 40, 50, or 100 contiguous amino acid deletions, additions, and/or substitutions relative to the translocation domain of SEQ ID NO: 24 or SEQ ID NO: 25; or at most 1, 2, 3, 4, 5, 6, 7, 8, 9, 10, 20, 30, 40, 50, or 100 contiguous amino acid deletions, additions, and/or substitutions relative to the translocation domain of SEQ ID NO: 24 or SEQ ID NO: 25. In further other aspects of this embodiment, a BuNT translocation domain comprises a polypeptide having, e.g., at least 1, 2, 3, 4, 5, 6, 7, 8, 9, 10, 20, 30, 40, 50, or 100 contiguous amino acid deletions, additions, and/or substitutions relative to amino acids 427-847 of SEQ ID NO: 24 or SEQ ID NO: 25; or at most 1, 2, 3, 4, 5, 6, 7, 8, 9, 10, 20, 30, 40, 50, or 100 contiguous amino acid deletions, additions, and/or substitutions relative to amino acids 427-847 of SEQ ID NO: 24 or SEQ ID NO: 25.

[0120] Aspects of the present specification provide, in part, a TVEMP comprising a targeting domain. As used herein, the term “targeting domain” is synonymous with “binding domain”, “ligand”, or “targeting moiety” and refers to an amino acid sequence region able to preferentially bind to a cell surface marker, like a receptor, characteristic of the target cell under physiological conditions. The cell surface marker may comprise a polypeptide, a glycoprotein, a lipoprotein, or may have structural characteristics of more than one of these. As used herein, the term “preferentially interacts” refers to a molecule capable of binding to its target cell surface marker under physiological conditions, or in vitro conditions substantially approximating physiological conditions, to a statistically significantly greater degree relative to other, non-target cell surface marker. With reference to a targeting domain disclosed herein, there is a discriminatory binding of the targeting domain to its cognate receptor relative to other receptors. Examples of binding domains are described in, e.g., Steward, L. E. et al., Modified Clostridial Toxins with Enhanced Translocation Capability and Enhanced Targeting Activity, U.S. patent application Ser. No. 11/776,043 (Jul. 11, 2007); Steward, L. E. et al., Modified Clostridial Toxins with Enhanced Translocation Capabilities and Altered Targeting Activity For Clostridial Toxin Target Cells, U.S. patent application Ser. No. 11/776,052 (Jul. 11, 2007); and Steward, L. E. et al., Modified Clostridial Toxins with Enhanced Translocation Capabilities and Altered Targeting Activity For Non-Clostridial Toxin Target Cells, U.S. patent application Ser. No. 11/776,075 (Jul. 11, 2007), each of which is incorporated by reference in its entirety.

[0121] In an embodiment, a binding domain that selectively binds a target receptor has a dissociation equilibrium constant (K_{D}) that is greater for the target receptor relative to a non-target receptor by, e.g., at least one-fold, at least two-fold, at least three-fold, at least four fold, at least five-fold, at least 10 fold, at least 50 fold, at least 100 fold, at least 1000, at least 10,000, or at least 100,000 fold.

[0122] An example of a targeting domain disclosed herein is an apelin targeting domain, an anthrax protective antigen (APA) targeting domain, or an angiogenic factor with G patch and FHA domain 1 (AGGF1) targeting domain. Apelin, APA, and AGGF1 targeting domains bind to transmembrane receptors present on the surface of endothelial cells associated with aberrant new blood vessel formation. For example, apelin receptors are expressed in endothelial cells participating in angiogenesis and neovasculogenesis associated with several disorders including ocular disorders. As another example, APA receptors like tumor endothelial marker 8 (TEM8) and capillary morphogeneisis gene 2 protein (CMG2) are expressed in endothelial cells undergoing angiogenesis in response to tumor progression, as well as endothelial cells participating in angiogenesis and neovasculogenesis associated with several disorders including ocular disorders. As yet another example, AGGF1 receptors are expressed in endothelial cells participating in angiogenesis and neovasculogenesis associated with several disorders including ocular disorders. As such, a TVEMP comprising an apelin targeting domain, an APA targeting domain, or an AGGF1 targeting domain would be effective in treating a disease or disorder associated with aberrant new blood vessel formation.

[0123] Thus, in an embodiment, a targeting domain comprises an apelin targeting domain, an APA targeting domain, or an AGGF1 targeting domain. In aspects of this embodiment, a targeting domain comprises an apelin targeting domain including SEQ ID NO: 82, SEQ ID NO: 83, SEQ ID NO: 84, SEQ ID NO: 85, SEQ ID NO: 86, or SEQ ID NO: 87; an APA targeting domain including SEQ ID NO: 88; or an AGGF1 targeting domain including SEQ ID NO: 89, SEQ ID NO: 90, SEQ ID NO: 91, SEQ ID NO: 92, SEQ ID NO: 93, SEQ ID NO: 94, SEQ ID NO: 95, SEQ ID NO: 96, SEQ ID NO: 97, or SEQ ID NO: 98. In yet other aspects of this embodiment, a targeting domain comprises an apelin targeting domain including amino acids 42-77 of SEQ ID NO: 82, SEQ ID NO: 83, SEQ ID NO: 84, SEQ ID NO: 85, SEQ ID NO: 86, SEQ ID NO: 87, SEQ ID NO: 88; an APA targeting domain including amino acids 30-764, amino acids 30-287, amino acids 30-196, amino acids 47-178, amino acids 204-628, amino acids 288-516, amino acids 517-624, amino acids 625-764 of SEQ ID NO: 89; or an AGGF1 targeting domain including amino acids 410-516 of SEQ ID NO: 90, amino acids 95-201 of SEQ ID NO: 91, amino acids 406-512 of SEQ ID NO: 92, amino acids 410-516 of SEQ ID NO: 93, amino acids 408-514 of SEQ ID NO: 94, amino acids 420-513 of SEQ ID NO: 95, amino acids 414-507 of SEQ ID NO: 96, amino acids 407-512 of SEQ ID NO: 97, or amino acids 469-574 of SEQ ID NO: 98.

[0124] In other aspects of this embodiment, an apelin targeting domain, an APA targeting domain, or an AGGF1 targeting domain comprises a polypeptide having an amino acid identity of, e.g., at least 70%, at least 75%, at least 80%, at least 85%, at least 90% or at least 95% to SEQ ID NO: 82, SEQ ID NO: 83, SEQ ID NO: 84, SEQ ID NO: 85, SEQ ID NO: 86, SEQ ID NO: 87, SEQ ID NO: 88, SEQ ID NO: 89, SEQ ID NO: 90, SEQ ID NO: 91, SEQ ID NO: 92, SEQ ID NO: 93, SEQ ID NO: 94, SEQ ID NO: 95, SEQ ID NO: 96, SEQ ID NO: 97, or SEQ ID NO: 98; or at most 70%, at most 75%, at most 80%, at most 85%, at most 90% or at most 95% to SEQ ID NO: 82, SEQ ID NO: 83, SEQ ID NO: 84, SEQ ID NO: 85, SEQ ID NO: 86, SEQ ID NO: 87, SEQ ID NO: 88, SEQ ID NO: 89, SEQ ID NO: 90, SEQ ID NO: 91, SEQ ID NO: 92, SEQ ID NO: 93, SEQ ID NO: 94, SEQ ID NO: 95, SEQ ID NO: 96, SEQ ID NO: 97, or SEQ ID NO: 98. In yet other aspects of this embodiment, an apelin targeting domain, an APA targeting domain, or an AGGF1 targeting domain comprises a polypeptide having, e.g., at least 1, 2, 3, 4, 5, 6, 7, 8, 9, 10, 15 or 20 non-contiguous amino acid deletions, additions, and/or substitutions relative to SEQ ID NO: 82, SEQ ID NO: 83, SEQ ID NO: 84, SEQ ID NO: 85, SEQ ID NO: 86, SEQ ID NO: 87, SEQ ID NO: 88, SEQ ID NO: 89, SEQ ID NO: 90, SEQ ID NO: 91, SEQ ID NO: 92, SEQ ID NO: 93, SEQ ID NO: 94, SEQ ID NO: 95, SEQ ID NO: 96, SEQ ID NO: 97, or SEQ ID NO: 98; or at most 1, 2, 3, 4, 5, 6, 7, 8, 9, 10, 15 or 20 non-contiguous amino acid deletions, additions, and/or substitutions relative to SEQ ID NO: 82, SEQ ID NO: 83, SEQ ID NO: 84, SEQ ID NO: 85, SEQ ID NO: 86, SEQ ID NO: 87, SEQ ID NO: 88, SEQ ID NO: 89, SEQ ID NO: 90, SEQ ID NO: 91, SEQ ID NO: 92, SEQ ID NO: 93, SEQ ID NO: 94, SEQ ID NO: 95, SEQ ID NO: 96, SEQ ID NO: 97, or SEQ ID NO: 98. In still other aspects of this embodiment an apelin targeting domain, an APA targeting domain, or an AGGF1 targeting domain comprises a polypeptide having, e.g., at least 1, 2, 3, 4, 5, 6, 7, 8, 9, 10, 15 or 20 contiguous amino acid deletions, additions, and/or substitutions relative to SEQ ID NO: 82, SEQ ID NO: 83, SEQ ID NO: 84, SEQ ID NO: 85, SEQ ID NO: 86, SEQ ID NO: 87, SEQ ID NO: 88, SEQ ID NO: 89, SEQ ID NO: 90, SEQ ID NO: 91, SEQ ID NO: 92, SEQ ID NO: 93, SEQ ID NO: 94, SEQ ID NO: 95, SEQ ID NO: 96, SEQ ID NO: 97, or SEQ ID NO: 98; or at most 1, 2, 3, 4, 5, 6, 7, 8, 9, 10, 15 or 20 contiguous amino acid deletions, additions, and/or substitutions relative to SEQ ID NO: 82, SEQ ID NO: 83, SEQ ID NO: 84, SEQ ID NO: 85, SEQ ID NO: 86, SEQ ID NO: 87, SEQ ID NO: 88, SEQ ID NO: 89, SEQ ID NO: 90, SEQ ID NO: 91, SEQ ID NO: 92, SEQ ID NO: 93, SEQ ID NO: 94, SEQ ID NO: 95, SEQ ID NO: 96, SEQ ID NO: 97, or SEQ ID NO: 98.

[0125] In other aspects of this embodiment, an apelin targeting domain, an APA targeting domain, or an AGGF1 targeting domain comprises a polypeptide having an amino acid identity of, e.g., at least 70%, at least 75%, at least 80%, at least 85%, at least 90% or at least 95% to amino acids 42-77 of SEQ ID NO: 82, SEQ ID NO: 83, SEQ ID NO: 84, SEQ ID NO: 85, SEQ ID NO: 86, SEQ ID NO: 87, SEQ ID NO: 88; amino acids 30-764, amino acids 30-287, amino acids 30-196, amino acids 47-178, amino acids 204-628, amino acids 288-516, amino acids 517-624, amino acids 625-764 of SEQ ID NO: 89; or amino acids 410-516 of SEQ ID NO: 90, amino acids 95-201 of SEQ ID NO: 91, amino acids 406-512 of SEQ ID NO: 92, amino acids 410-516 of SEQ ID NO: 93, amino acids 408-514 of SEQ ID NO: 94, amino acids 420-513 of SEQ ID NO: 95, amino acids 414-507 of SEQ ID NO: 96, amino acids 407-512 of SEQ ID NO: 97, or amino acids 469-574 of SEQ ID NO: 98; or at most 70%, at most 75%, at most 80%, at most 85%, at most 90% or at most 95% to amino acids 42-77 of SEQ ID NO: 82, SEQ ID NO: 83, SEQ ID NO: 84, SEQ ID NO: 85, SEQ ID NO: 86, SEQ ID NO: 87, SEQ ID NO: 88; amino acids 30-764, amino acids 30-287, amino acids 30-196, amino acids 47-178, amino acids 204-628, amino acids 288-516, amino acids 517-624, amino acids 625-764 of SEQ ID NO: 89; or amino acids 410-516 of SEQ ID NO: 90, amino acids 95-201 of SEQ ID NO: 91, amino acids 406-512 of SEQ ID NO: 92, amino acids 410-516 of SEQ ID NO: 93, amino acids 408-514 of SEQ ID NO: 94, amino acids 420-513 of SEQ ID NO: 95, amino acids 414-507 of SEQ ID NO: 96, amino acids 407-512 of SEQ ID NO: 97, or amino acids 469-574 of SEQ ID NO: 98. In yet other aspects of this embodiment, an apelin targeting domain, an APA targeting domain, or an AGGF1 targeting domain targeting domain comprises a polypeptide having, e.g., at least 1, 2, 3, 4, 5, 6, 7, 8, 9, 10, 15 or 20 non-contiguous amino acid deletions, additions, and/or substitutions relative to amino acids 42-77 of SEQ ID NO: 82, SEQ ID NO: 83, SEQ ID NO: 84, SEQ ID NO: 85, SEQ ID NO: 86, SEQ ID NO: 87, SEQ ID NO: 88; amino acids 30-764, amino acids 30-287, amino acids 30-196, amino acids 47-178, amino acids 204-628, amino acids 288-516, amino acids 517-624, amino acids 625-764 of SEQ ID NO: 89; or amino acids 410-516 of SEQ ID NO: 90, amino acids 95-201 of SEQ ID NO: 91, amino acids 406-512 of SEQ ID NO: 92, amino acids 410-516 of SEQ ID NO: 93, amino acids 408-514 of SEQ ID NO: 94, amino acids 420-513 of SEQ ID NO: 95, amino acids 414-507 of SEQ ID NO: 96, amino acids 407-512 of SEQ ID NO: 97, or amino acids 469-574 of SEQ ID NO: 98; or at most 1, 2, 3, 4, 5, 6, 7, 8, 9, 10, 15 or 20 non-contiguous amino acid deletions, additions, and/or substitutions relative to amino acids 42-77 of SEQ ID NO: 82, SEQ ID NO: 83, SEQ ID NO: 84, SEQ ID NO: 85, SEQ ID NO: 86, SEQ ID NO: 87, SEQ ID NO: 88; amino acids 30-764, amino acids 30-287, amino acids 30-196, amino acids 47-178, amino acids 204-628, amino acids 288-516, amino acids 517-624, amino acids 625-764 of SEQ ID NO: 89; or amino acids 410-516 of SEQ ID NO: 90, amino acids 95-201 of SEQ ID NO: 91, amino acids 406-512 of SEQ ID NO: 92, amino acids 410-516 of SEQ ID NO: 93, amino acids 408-514 of SEQ ID NO: 94, amino acids 420-513 of SEQ ID NO: 95, amino acids 414-507 of SEQ ID NO: 96, amino acids 407-512 of SEQ ID NO: 97, or amino acids 469-574 of SEQ ID NO: 98. In still other aspects of this embodiment, an apelin targeting domain, an APA targeting domain, or an AGGF1 targeting domain targeting domain comprises a polypeptide having, e.g., at least 1, 2, 3, 4, 5, 6, 7, 8, 9, 10, 15 or 20 contiguous amino acid deletions, additions, and/or substitutions relative to amino acids 42-77 of SEQ ID NO: 82, SEQ ID NO: 83, SEQ ID NO: 84, SEQ ID NO: 85, SEQ ID NO: 86, SEQ ID NO: 87, SEQ ID NO: 88; amino acids 30-764, amino acids 30-287, amino acids 30-196, amino acids 47-178, amino acids 204-628, amino acids 288-516, amino acids 517-624, amino acids 625-764 of SEQ ID NO: 89; or amino acids 410-516 of SEQ ID NO: 90, amino acids 95-201 of SEQ ID NO: 91, amino acids 406-512 of SEQ ID NO: 92, amino acids 410-516 of SEQ ID NO: 93, amino acids 408-514 of SEQ ID NO: 94, amino acids 420-513 of SEQ ID NO: 95, amino acids 414-507 of SEQ ID NO: 96, amino acids 407-512 of SEQ ID NO: 97, or amino acids 469-574 of SEQ ID NO: 98; or at most 1, 2, 3, 4, 5, 6, 7, 8, 9, 10, 15 or 20 contiguous amino acid deletions, additions, and/or substitutions relative to amino acids 42-77 of SEQ ID NO: 82, SEQ ID NO: 83, SEQ ID NO: 84, SEQ ID NO: 85, SEQ ID NO: 86, SEQ ID NO: 87, SEQ ID NO: 88; amino acids 30-764, amino acids 30-287, amino acids 30-196, amino acids 47-178, amino acids 204-628, amino acids 288-516, amino acids 517-624, amino acids 625-764 of SEQ ID NO: 89; or amino acids 410-516 of SEQ ID NO: 90, amino acids 95-201 of SEQ ID NO: 91, amino acids 406-512 of SEQ ID NO: 92, amino acids 410-516 of SEQ ID NO: 93, amino acids 408-514 of SEQ ID NO: 94, amino acids 420-513 of SEQ ID NO: 95, amino acids 414-507 of SEQ ID NO: 96, amino acids 407-512 of SEQ ID NO: 97, or amino acids 469-574 of SEQ ID NO: 98.

[0126] An example of a targeting domain disclosed herein is an angiopoietin (Ang) targeting domain. Non-limiting examples of an angiopoietin targeting domain include an angiopoietin-1 targeting domain, an angiopoietin-2 targeting domain, an angiopoietin-3 targeting domain, and an angiopoietin-4 targeting domain. Angiopoietin targeting domains bind to transmembrane tyrosine kinase receptors present on the surface of endothelial cells associated with aberrant new blood vessel formation. For example, angiopoietin receptors like Tie-2 are expressed in endothelial cells participating in angiogenesis and neovasculogenesis associated with several disorders including ocular disorders. As such, a TVEMP comprising an angiopoietin targeting domain would be effective in treating a disease or disorder associated with aberrant new blood vessel formation.

[0127] Thus, in an embodiment, a targeting domain comprises an angiopoietin targeting domain. In aspects of this embodiment, an angiopoietin targeting domain comprises an angiopoietin-1 targeting domain, an angiopoietin-2 targeting domain, an angiopoietin-3 targeting domain, and an angiopoietin-4 targeting domain. In other aspects of this embodiment, an angiopoietin targeting domain comprises SEQ ID NO: 99, SEQ ID NO: 100, SEQ ID NO: 101, SEQ ID NO: 102, SEQ ID NO: 103, SEQ ID NO: 104, SEQ ID NO: 105, SEQ ID NO: 106, SEQ ID NO: 107, SEQ ID NO: 108, or SEQ ID NO: 109. In yet other aspects of this embodiment, an angiopoietin targeting domain comprises amino acids 280-495 or amino acids 282-496 of SEQ ID NO: 99, SEQ ID NO: 100, or SEQ ID NO: 101; amino acids 280-492 or amino acids 281-493 of SEQ ID NO: 102, SEQ ID NO: 103, or SEQ ID NO: 104; amino acids 286-501, amino acids 239-451, or amino acids 292-507 of SEQ ID NO: 105, SEQ ID NO: 106, or SEQ ID NO: 107; or amino acids 286-501 or amino acids 292-507 of SEQ ID NO: 108 or SEQ ID NO: 109.

[0128] In other aspects of this embodiment, an angiopoietin targeting domain comprises a polypeptide having an amino acid identity of, e.g., at least 70%, at least 75%, at least 80%, at least 85%, at least 90% or at least 95% to SEQ ID NO: 99, SEQ ID NO: 100, SEQ ID NO: 101, SEQ ID NO: 102, SEQ ID NO: 103, SEQ ID NO: 104, SEQ ID NO: 105, SEQ ID NO: 106, SEQ ID NO: 107, SEQ ID NO: 108, or SEQ ID NO: 109; or at most 70%, at most 75%, at most 80%, at most 85%, at most 90% or at most 95% to SEQ ID NO: 99, SEQ ID NO: 100, SEQ ID NO: 101, SEQ ID NO: 102, SEQ ID NO: 103, SEQ ID NO: 104, SEQ ID NO: 105, SEQ ID NO: 106, SEQ ID NO: 107, SEQ ID NO: 108, or SEQ ID NO: 109. In yet other aspects of this embodiment, an angiopoietin targeting domain comprises a polypeptide having, e.g., at least 1, 2, 3, 4, 5, 6, 7, 8, 9, 10, 15 or 20 non-contiguous amino acid deletions, additions, and/or substitutions relative to SEQ ID NO: 99, SEQ ID NO: 100, SEQ ID NO: 101, SEQ ID NO: 102, SEQ ID NO: 103, SEQ ID NO: 104, SEQ ID NO: 105, SEQ ID NO: 106, SEQ ID NO: 107, SEQ ID NO: 108, or SEQ ID NO: 109; or at most 1, 2, 3, 4, 5, 6, 7, 8, 9, 10, 15 or 20 non-contiguous amino acid deletions, additions, and/or substitutions relative to SEQ ID NO: 99, SEQ ID NO: 100, SEQ ID NO: 101, SEQ ID NO: 102, SEQ ID NO: 103, SEQ ID NO: 104, SEQ ID NO: 105, SEQ ID NO: 106, SEQ ID NO: 107, SEQ ID NO: 108, or SEQ ID NO: 109. In still other aspects of this embodiment, an angiopoietin targeting domain comprises a polypeptide having, e.g., at least 1, 2, 3, 4, 5, 6, 7, 8, 9, 10, 15 or 20 contiguous amino acid deletions, additions, and/or substitutions relative to SEQ ID NO: 99, SEQ ID NO: 100, SEQ ID NO: 101, SEQ ID NO: 102, SEQ ID NO: 103, SEQ ID NO: 104, SEQ ID NO: 105, SEQ ID NO: 106, SEQ ID NO: 107, SEQ ID NO: 108, or SEQ ID NO: 109; or at most 1, 2, 3, 4, 5, 6, 7, 8, 9, 10, 15 or 20 contiguous amino acid deletions, additions, and/or substitutions relative to SEQ ID NO: 99, SEQ ID NO: 100, SEQ ID NO: 101, SEQ ID NO: 102, SEQ ID NO: 103, SEQ ID NO: 104, SEQ ID NO: 105, SEQ ID NO: 106, SEQ ID NO: 107, SEQ ID NO: 108, or SEQ ID NO: 109.

[0129] In other aspects of this embodiment, an angiopoietin targeting domain comprises a polypeptide having an amino acid identity of, e.g., at least 70%, at least 75%, at least 80%, at least 85%, at least 90% or at least 95% to amino acids 280-495 or amino acids 282-496 of SEQ ID NO: 99, SEQ ID NO: 100, or SEQ ID NO: 101; amino acids 280-492 or amino acids 281-493 of SEQ ID NO: 102, SEQ ID NO: 103, or SEQ ID NO: 104; amino acids 286-501, amino acids 239-451, or amino acids 292-507 of SEQ ID NO: 105, SEQ ID NO: 106, or SEQ ID NO: 107; or amino acids 286-501 or amino acids 292-507 of SEQ ID NO: 108 or SEQ ID NO: 109; or at most 70%, at most 75%, at most 80%, at most 85%, at most 90% or at most 95% to amino acids 280-495 or amino acids 282-496 of SEQ ID NO: 99, SEQ ID NO: 100, or SEQ ID NO: 101; amino acids 280-492 or amino acids 281-493 of SEQ ID NO: 102, SEQ ID NO: 103, or SEQ ID NO: 104; amino acids 286-501, amino acids 239-451, or amino acids 292-507 of SEQ ID NO: 105, SEQ ID NO: 106, or SEQ ID NO: 107; or amino acids 286-501 or amino acids 292-507 of SEQ ID NO: 108 or SEQ ID NO: 109. In yet other aspects of this embodiment, an angiopoietin targeting domain comprises a polypeptide having, e.g., at least 1, 2, 3, 4, 5, 6, 7, 8, 9, 10, 15 or 20 non-contiguous amino acid deletions, additions, and/or substitutions relative to amino acids 280-495 or amino acids 282-496 of SEQ ID NO: 99, SEQ ID NO: 100, or SEQ ID NO: 101; amino acids 280-492 or amino acids 281-493 of SEQ ID NO: 102, SEQ ID NO: 103, or SEQ ID NO: 104; amino acids 286-501, amino acids 239-451, or amino acids 292-507 of SEQ ID NO: 105, SEQ ID NO: 106, or SEQ ID NO: 107; or amino acids 286-501 or amino acids 292-507 of SEQ ID NO: 108 or SEQ ID NO: 109; or at most 1, 2, 3, 4, 5, 6, 7, 8, 9, 10, 15 or 20 non-contiguous amino acid deletions, additions, and/or substitutions relative to amino acids 280-495 or amino acids 282-496 of SEQ ID NO: 99, SEQ ID NO: 100, or SEQ ID NO: 101; amino acids 280-492 or amino acids 281-493 of SEQ ID NO: 102, SEQ ID NO: 103, or SEQ ID NO: 104; amino acids 286-501, amino acids 239-451, or amino acids 292-507 of SEQ ID NO: 105, SEQ ID NO: 106, or SEQ ID NO: 107; or amino acids 286-501 or amino acids 292-507 of SEQ ID NO: 108 or SEQ ID NO: 109. In still other aspects of this embodiment, an angiopoietin targeting domain comprises a polypeptide having, e.g., at least 1, 2, 3, 4, 5, 6, 7, 8, 9, 10, 15 or 20 contiguous amino acid deletions, additions, and/or substitutions relative to amino acids 280-495 or amino acids 282-496 of SEQ ID NO: 99, SEQ ID NO: 100, or SEQ ID NO: 101; amino acids 280-492 or amino acids 281-493 of SEQ ID NO: 102, SEQ ID NO: 103, or SEQ ID NO: 104; amino acids 286-501, amino acids 239-451, or amino acids 292-507 of SEQ ID NO: 105, SEQ ID NO: 106, or SEQ ID NO: 107; or amino acids 286-501 or amino acids 292-507 of SEQ ID NO: 108 or SEQ ID NO: 109; or at most 1, 2, 3, 4, 5, 6, 7, 8, 9, 10, 15 or 20 contiguous amino acid deletions, additions, and/or substitutions relative to amino acids 280-495 or amino acids 282-496 of SEQ ID NO: 99, SEQ ID NO: 100, or SEQ ID NO: 101; amino acids 280-492 or amino acids 281-493 of SEQ ID NO: 102, SEQ ID NO: 103, or SEQ ID NO: 104; amino acids 286-501, amino acids 239-451, or amino acids 292-507 of SEQ ID NO: 105, SEQ ID NO: 106, or SEQ ID NO: 107; or amino acids 286-501 or amino acids 292-507 of SEQ ID NO: 108 or SEQ ID NO: 109.

[0130] An example of a targeting domain disclosed herein is an angiostatin targeting domain or an angiogenin targeting domain. Angiostatin and angiogenin targeting domains bind to transmembrane receptors present on the surface of endothelial cells associated with aberrant new blood vessel formation. For example, angiostatin receptors like angiomotin, angiomotin-like 1/JEAP, angiomotin-like 2, and hepatocyte growth factor receptor c-met are expressed in endothelial cells undergoing angiogenesis in response to tumor progression, as well as endothelial cells participating in angiogenesis and neovasculogenesis associated with several disorders including cardiovascular disorders. As another example, angiogenin receptors like 170 kDa receptor are expressed in endothelial cells undergoing angiogenesis in response to tumor progression, as well as endothelial cells participating in angiogenesis and neovasculogenesis associated with several disorders including ocular disorders. As such, a TVEMP comprising an angiostatin targeting domain or an angiogenin targeting domain would be effective in treating a disease or disorder associated with aberrant new blood vessel formation.

[0131] Thus, in an embodiment, a targeting domain comprises an angiostatin targeting domain or an angiogenin targeting domain. In aspects of this embodiment, a targeting domain comprises an angiostatin targeting domain including SEQ ID NO: 110 or SEQ ID NO: 111; or an angiogenin targeting domain including SEQ ID NO: 112, SEQ ID NO: 113, SEQ ID NO: 114, SEQ ID NO: 115, or SEQ ID NO: 116. In yet other aspects of this embodiment, a targeting domain comprises an angiostatin targeting domain including amino acids 1-182, amino acids 1-262, amino acids 1-349, or amino acids 1-455 of SEQ ID NO: 110 or SEQ ID NO: 111; or an angiogenin targeting domain including amino acids 25-145 or amino acids 29-140 of SEQ ID NO: 112, SEQ ID NO: 113, SEQ ID NO: 114, SEQ ID NO: 115, or SEQ ID NO: 116.

[0132] In other aspects of this embodiment, an angiostatin targeting domain or an angiogenin targeting domain comprises a polypeptide having an amino acid identity of, e.g., at least 70%, at least 75%, at least 80%, at least 85%, at least 90% or at least 95% to SEQ ID NO: 110, SEQ ID NO: 111, SEQ ID NO: 112, SEQ ID NO: 113, SEQ ID NO: 114, SEQ ID NO: 115, or SEQ ID NO: 116; or at most 70%, at most 75%, at most 80%, at most 85%, at most 90% or at most 95% to SEQ ID NO: 110, SEQ ID NO: 111, SEQ ID NO: 112, SEQ ID NO: 113, SEQ ID NO: 114, SEQ ID NO: 115, or SEQ ID NO: 116. In yet other aspects of this embodiment, an angiostatin targeting domain or an angiogenin targeting domain comprises a polypeptide having, e.g., at least 1, 2, 3, 4, 5, 6, 7, 8, 9, 10, 15 or 20 non-contiguous amino acid deletions, additions, and/or substitutions relative to SEQ ID NO: 110, SEQ ID NO: 111, SEQ ID NO: 112, SEQ ID NO: 113, SEQ ID NO: 114, SEQ ID NO: 115, or SEQ ID NO: 116; or at most 1, 2, 3, 4, 5, 6, 7, 8, 9, 10, 15 or 20 non-contiguous amino acid deletions, additions, and/or substitutions relative to SEQ ID NO: 110, SEQ ID NO: 111, SEQ ID NO: 112, SEQ ID NO: 113, SEQ ID NO: 114, SEQ ID NO: 115, or SEQ ID NO: 116. In still other aspects of this embodiment an angiostatin targeting domain or an angiogenin targeting domain comprises a polypeptide having, e.g., at least 1, 2, 3, 4, 5, 6, 7, 8, 9, 10, 15 or 20 contiguous amino acid deletions, additions, and/or substitutions relative to SEQ ID NO: 110, SEQ ID NO: 111, SEQ ID NO: 112, SEQ ID NO: 113, SEQ ID NO: 114, SEQ ID NO: 115, or SEQ ID NO: 116; or at most 1, 2, 3, 4, 5, 6, 7, 8, 9, 10, 15 or 20 contiguous amino acid deletions, additions, and/or substitutions relative to SEQ ID NO: 110, SEQ ID NO: 111, SEQ ID NO: 112, SEQ ID NO: 113, SEQ ID NO: 114, SEQ ID NO: 115, or SEQ ID NO: 116.

[0133] In other aspects of this embodiment, an angiostatin targeting domain or an angiogenin targeting domain comprises a polypeptide having an amino acid identity of, e.g., at least 70%, at least 75%, at least 80%, at least 85%, at least 90% or at least 95% to amino acids 1-182, amino acids 1-262, amino acids 1-349, or amino acids 1-455 of SEQ ID NO: 110 or SEQ ID NO: 111; or amino acids 25-145 or amino acids 29-140 of SEQ ID NO: 112, SEQ ID NO: 113, SEQ ID NO: 114, SEQ ID NO: 115, or SEQ ID NO: 116; or at most 70%, at most 75%, at most 80%, at most 85%, at most 90% or at most 95% to amino acids 1-182, amino acids 1-262, amino acids 1-349, or amino acids 1-455 of SEQ ID NO: 110 or SEQ ID NO: 111; or amino acids 25-145 or amino acids 29-140 of SEQ ID NO: 112, SEQ ID NO: 113, SEQ ID NO: 114, SEQ ID NO: 115, or SEQ ID NO: 116. In yet other aspects of this embodiment, an angiostatin targeting domain or an angiogenin targeting domain comprises a polypeptide having, e.g., at least 1, 2, 3, 4, 5, 6, 7, 8, 9, 10, 15 or 20 non-contiguous amino acid deletions, additions, and/or substitutions relative to amino acids 1-182, amino acids 1-262, amino acids 1-349, or amino acids 1-455 of SEQ ID NO: 110 or SEQ ID NO: 111; or amino acids 25-145 or amino acids 29-140 of SEQ ID NO: 112, SEQ ID NO: 113, SEQ ID NO: 114, SEQ ID NO: 115, or SEQ ID NO: 116; or at most 1, 2, 3, 4, 5, 6, 7, 8, 9, 10, 15 or 20 non-contiguous amino acid deletions, additions, and/or substitutions relative to amino acids 1-182, amino acids 1-262, amino acids 1-349, or amino acids 1-455 of SEQ ID NO: 110 or SEQ ID NO: 111; or amino acids 25-145 or amino acids 29-140 of SEQ ID NO: 112, SEQ ID NO: 113, SEQ ID NO: 114, SEQ ID NO: 115, or SEQ ID NO: 116. In still other aspects of this embodiment, an angiostatin targeting domain or an angiogenin targeting domain targeting domain comprises a polypeptide having, e.g., at least 1, 2, 3, 4, 5, 6, 7, 8, 9, 10, 15 or 20 contiguous amino acid deletions, additions, and/or substitutions relative to amino acids 1-182, amino acids 1-262, amino acids 1-349, or amino acids 1-455 of SEQ ID NO: 110 or SEQ ID NO: 111; or amino acids 25-145 or amino acids 29-140 of SEQ ID NO: 112, SEQ ID NO: 113, SEQ ID NO: 114, SEQ ID NO: 115, or SEQ ID NO: 116; or at most 1, 2, 3, 4, 5, 6, 7, 8, 9, 10, 15 or 20 contiguous amino acid deletions, additions, and/or substitutions relative to amino acids 1-182, amino acids 1-262, amino acids 1-349, or amino acids 1-455 of SEQ ID NO: 110 or SEQ ID NO: 111; or amino acids 25-145 or amino acids 29-140 of SEQ ID NO: 112, SEQ ID NO: 113, SEQ ID NO: 114, SEQ ID NO: 115, or SEQ ID NO: 116.

[0134] An example of a targeting domain disclosed herein is an endothelin targeting domain or an endothelial cell-specific molecule (ECSM) targeting domain. Non-limiting examples of an endothelin targeting domain include an endothelin-1 targeting domain, an endothelin-2 targeting domain and an endothelin-3 targeting domain. Non-limiting examples of an ECSM targeting domain include an endothelial cell-specific molecule-1 (ECSM-1) targeting domain. Endothelin and ECSM targeting domains bind to transmembrane receptors present on the surface of endothelial cells associated with aberrant new blood vessel formation. For example, endothelin receptors are expressed in endothelial cells undergoing angiogenesis in response to tumor progression, as well as endothelial cells participating in angiogenesis and neovasculogenesis associated with several disorders including ocular disorders. As another example, ECSM receptors are expressed in endothelial participating in angiogenesis and neovasculogenesis associated with several disorders including ocular disorders. As such, a TVEMP comprising an endothelin targeting domain or an ECSM targeting domain would be effective in treating a disease or disorder associated with aberrant new blood vessel formation.

[0135] Thus, in an embodiment, a targeting domain comprises an endothelin targeting domain or an ECSM targeting domain. In aspects of this embodiment, an endothelin targeting domain is an endothelin-1 targeting domain, an endothelin-2 targeting domain and an endothelin-3 targeting domain. In other aspects of this embodiment, an ECSM targeting domain is an ECSM-1 targeting domain. In aspects of this embodiment, a targeting domain comprises an endothelin targeting domain including SEQ ID NO: 117, SEQ ID NO: 118, SEQ ID NO: 119, SEQ ID NO: 120, SEQ ID NO: 121, SEQ ID NO: 122, SEQ ID NO: 123, SEQ ID NO: 124, SEQ ID NO: 125, SEQ ID NO: 126, SEQ ID NO: 127, SEQ ID NO: 128, SEQ ID NO: 129, SEQ ID NO: 130, SEQ ID NO: 131, SEQ ID NO: 132, SEQ ID NO: 133, SEQ ID NO: 134, SEQ ID NO: 135, SEQ ID NO: 136, SEQ ID NO: 137, or SEQ ID NO: 138; or an ECSM targeting domain including SEQ ID NO: 139, SEQ ID NO: 140, SEQ ID NO: 141, SEQ ID NO: 142, SEQ ID NO: 143, SEQ ID NO: 144, SEQ ID NO: 145, SEQ ID NO: 146, or SEQ ID NO: 147. In yet other aspects of this embodiment, a targeting domain comprises an endothelin targeting domain including amino acids 53-73, amino acids 60-78, or amino acids 109-129 of SEQ ID NO: 117, SEQ ID NO: 118, SEQ ID NO: 119, SEQ ID NO: 120, SEQ ID NO: 121, or SEQ ID NO: 122, amino acids 49-69 or amino acids 96-111 of SEQ ID NO: 123 or SEQ ID NO: 124, amino acids 48-68 or amino acids 95-110 of SEQ ID NO: 125, amino acids 46-66 or amino acids 93-108 of SEQ ID NO: 126, amino acids 47-67 or amino acids 94-109 of SEQ ID NO: 127, amino acids 43-63 or amino acids 90-105 of SEQ ID NO: 128, amino acids 97-117 or amino acids 159-173 of SEQ ID NO: 129, SEQ ID NO: 130, SEQ ID NO: 131, or SEQ ID NO: 136, amino acids 85-114 or amino acids 150-171 of SEQ ID NO: 132, SEQ ID NO: 133, SEQ ID NO: 134, amino acids 83-103 or amino acids 144-158 of SEQ ID NO: 135, amino acids 53-73 or amino acids 115-135 of SEQ ID NO: 137, or amino acids 8-33 of SEQ ID NO 138; or an ECSM targeting domain including amino acids 22-184, amino acids 26-100, amino acids 46-100, or amino acids 72-146 of SEQ ID NO: 139, SEQ ID NO: 140, SEQ ID NO: 141, SEQ ID NO: 142, SEQ ID NO: 144, SEQ ID NO: 145, SEQ ID NO: 146, SEQ ID NO: 147; or amino acids 22-229 or amino acids 72-146 of SEQ ID NO: 143.

[0136] In other aspects of this embodiment, an endothelin targeting domain or an ECSM targeting domain comprises a polypeptide having an amino acid identity of, e.g., at least 70%, at least 75%, at least 80%, at least 85%, at least 90% or at least 95% to SEQ ID NO: 117, SEQ ID NO: 118, SEQ ID NO: 119, SEQ ID NO: 120, SEQ ID NO: 121, SEQ ID NO: 122, SEQ ID NO: 123, SEQ ID NO: 124, SEQ ID NO: 125, SEQ ID NO: 126, SEQ ID NO: 127, SEQ ID NO: 128, SEQ ID NO: 129, SEQ ID NO: 130, SEQ ID NO: 131, SEQ ID NO: 132, SEQ ID NO: 133, SEQ ID NO: 134, SEQ ID NO: 135, SEQ ID NO: 136, SEQ ID NO: 137, SEQ ID NO: 138, SEQ ID NO: 139, SEQ ID NO: 140, SEQ ID NO: 141, SEQ ID NO: 142, SEQ ID NO: 143, SEQ ID NO: 144, SEQ ID NO: 145, SEQ ID NO: 146, or SEQ ID NO: 147. In yet other aspects of this embodiment, an endothelin targeting domain or an ECSM targeting domain comprises a polypeptide having, e.g., at least 1, 2, 3, 4, 5, 6, 7, 8, 9, 10, 15 or 20 non-contiguous amino acid deletions, additions, and/or substitutions relative to SEQ ID NO: 117, SEQ ID NO: 118, SEQ ID NO: 119, SEQ ID NO: 120, SEQ ID NO: 121, SEQ ID NO: 122, SEQ ID NO: 123, SEQ ID NO: 124, SEQ ID NO: 125, SEQ ID NO: 126, SEQ ID NO: 127, SEQ ID NO: 128, SEQ ID NO: 129, SEQ ID NO: 130, SEQ ID NO: 131, SEQ ID NO: 132, SEQ ID NO: 133, SEQ ID NO: 134, SEQ ID NO: 135, SEQ ID NO: 136, SEQ ID NO: 137, SEQ ID NO: 138, SEQ ID NO: 139, SEQ ID NO: 140, SEQ ID NO: 141, SEQ ID NO: 142, SEQ ID NO: 143, SEQ ID NO: 144, SEQ ID NO: 145, SEQ ID NO: 146, or SEQ ID NO: 147; or at most 1, 2, 3, 4, 5, 6, 7, 8, 9, 10, 15 or 20 non-contiguous amino acid deletions, additions, and/or substitutions relative to SEQ ID NO: 117, SEQ ID NO: 118, SEQ ID NO: 119, SEQ ID NO: 120, SEQ ID NO: 121, SEQ ID NO: 122, SEQ ID NO: 123, SEQ ID NO: 124, SEQ ID NO: 125, SEQ ID NO: 126, SEQ ID NO: 127, SEQ ID NO: 128, SEQ ID NO: 129, SEQ ID NO: 130, SEQ ID NO: 131, SEQ ID NO: 132, SEQ ID NO: 133, SEQ ID NO: 134, SEQ ID NO: 135, SEQ ID NO: 136, SEQ ID NO: 137, SEQ ID NO: 138, SEQ ID NO: 139, SEQ ID NO: 140, SEQ ID NO: 141, SEQ ID NO: 142, SEQ ID NO: 143, SEQ ID NO: 144, SEQ ID NO: 145, SEQ ID NO: 146, or SEQ ID NO: 147. In still other aspects of this embodiment an endothelin targeting domain or an ECSM targeting domain comprises a polypeptide having, e.g., at least 1, 2, 3, 4, 5, 6, 7, 8, 9, 10, 15 or 20 contiguous amino acid deletions, additions, and/or substitutions relative to SEQ ID NO: 117, SEQ ID NO: 118, SEQ ID NO: 119, SEQ ID NO: 120, SEQ ID NO: 121, SEQ ID NO: 122, SEQ ID NO: 123, SEQ ID NO: 124, SEQ ID NO: 125, SEQ ID NO: 126, SEQ ID NO: 127, SEQ ID NO: 128, SEQ ID NO: 129, SEQ ID NO: 130, SEQ ID NO: 131, SEQ ID NO: 132, SEQ ID NO: 133, SEQ ID NO: 134, SEQ ID NO: 135, SEQ ID NO: 136, SEQ ID NO: 137, SEQ ID NO: 138, SEQ ID NO: 139, SEQ ID NO: 140, SEQ ID NO: 141, SEQ ID NO: 142, SEQ ID NO: 143, SEQ ID NO: 144, SEQ ID NO: 145, SEQ ID NO: 146, or SEQ ID NO: 147.

[0137] In other aspects of this embodiment, an endothelin targeting domain or an ECSM targeting domain comprises a polypeptide having an amino acid identity of, e.g., at least 70%, at least 75%, at least 80%, at least 85%, at least 90% or at least 95% to amino acids 53-73, amino acids 60-78, or amino acids 109-129 of SEQ ID NO: 117, SEQ ID NO: 118, SEQ ID NO: 119, SEQ ID NO: 120, SEQ ID NO: 121, or SEQ ID NO: 122, amino acids 49-69 or amino acids 96-111 of SEQ ID NO: 123 or SEQ ID NO: 124, amino acids 48-68 or amino acids 95-110 of SEQ ID NO: 125, amino acids 46-66 or amino acids 93-108 of SEQ ID NO: 126, amino acids 47-67 or amino acids 94-109 of SEQ ID NO: 127, amino acids 43-63 or amino acids 90-105 of SEQ ID NO: 128, amino acids 97-117 or amino acids 159-173 of SEQ ID NO: 129, SEQ ID NO: 130, SEQ ID NO: 131, or SEQ ID NO: 136, amino acids 85-114 or amino acids 150-171 of SEQ ID NO: 132, SEQ ID NO: 133, SEQ ID NO: 134, amino acids 83-103 or amino acids 144-158 of SEQ ID NO: 135, amino acids 53-73 or amino acids 115-135 of SEQ ID NO: 137, or amino acids 8-33 of SEQ ID NO 138; or amino acids 22-184, amino acids 26-100, amino acids 46-100, or amino acids 72-146 of SEQ ID NO: 139, SEQ ID NO: 140, SEQ ID NO: 141, SEQ ID NO: 142, SEQ ID NO: 144, SEQ ID NO: 145, SEQ ID NO: 146, SEQ ID NO: 147; or amino acids 22-229 or amino acids 72-146 of SEQ ID NO: 143; or at most 70%, at most 75%, at most 80%, at most 85%, at most 90% or at most 95% to amino acids 53-73, amino acids 60-78, or amino acids 109-129 of SEQ ID NO: 117, SEQ ID NO: 118, SEQ ID NO: 119, SEQ ID NO: 120, SEQ ID NO: 121, or SEQ ID NO: 122, amino acids 49-69 or amino acids 96-111 of SEQ ID NO: 123 or SEQ ID NO: 124, amino acids 48-68 or amino acids 95-110 of SEQ ID NO: 125, amino acids 46-66 or amino acids 93-108 of SEQ ID NO: 126, amino acids 47-67 or amino acids 94-109 of SEQ ID NO: 127, amino acids 43-63 or amino acids 90-105 of SEQ ID NO: 128, amino acids 97-117 or amino acids 159-173 of SEQ ID NO: 129, SEQ ID NO: 130, SEQ ID NO: 131, or SEQ ID NO: 136, amino acids 85-114 or amino acids 150-171 of SEQ ID NO: 132, SEQ ID NO: 133, SEQ ID NO: 134, amino acids 83-103 or amino acids 144-158 of SEQ ID NO: 135, amino acids 53-73 or amino acids 115-135 of SEQ ID NO: 137, or amino acids 8-33 of SEQ ID NO 138; or amino acids 22-184, amino acids 26-100, amino acids 46-100, or amino acids 72-146 of SEQ ID NO: 139, SEQ ID NO: 140, SEQ ID NO: 141, SEQ ID NO: 142, SEQ ID NO: 144, SEQ ID NO: 145, SEQ ID NO: 146, SEQ ID NO: 147; or amino acids 22-229 or amino acids 72-146 of SEQ ID NO: 143. In yet other aspects of this embodiment, an endothelin targeting domain or an ECSM targeting domain comprises a polypeptide having, e.g., at least 1, 2, 3, 4, 5, 6, 7, 8, 9, 10, 15 or 20 non-contiguous amino acid deletions, additions, and/or substitutions relative to amino acids 53-73, amino acids 60-78, or amino acids 109-129 of SEQ ID NO: 117, SEQ ID NO: 118, SEQ ID NO: 119, SEQ ID NO: 120, SEQ ID NO: 121, or SEQ ID NO: 122, amino acids 49-69 or amino acids 96-111 of SEQ ID NO: 123 or SEQ ID NO: 124, amino acids 48-68 or amino acids 95-110 of SEQ ID NO: 125, amino acids 46-66 or amino acids 93-108 of SEQ ID NO: 126, amino acids 47-67 or amino acids 94-109 of SEQ ID NO: 127, amino acids 43-63 or amino acids 90-105 of SEQ ID NO: 128, amino acids 97-117 or amino acids 159-173 of SEQ ID NO: 129, SEQ ID NO: 130, SEQ ID NO: 131, or SEQ ID NO: 136, amino acids 85-114 or amino acids 150-171 of SEQ ID NO: 132, SEQ ID NO: 133, SEQ ID NO: 134, amino acids 83-103 or amino acids 144-158 of SEQ ID NO: 135, amino acids 53-73 or amino acids 115-135 of SEQ ID NO: 137, or amino acids 8-33 of SEQ ID NO 138; or amino acids 22-184, amino acids 26-100, amino acids 46-100, or amino acids 72-146 of SEQ ID NO: 139, SEQ ID NO: 140, SEQ ID NO: 141, SEQ ID NO: 142, SEQ ID NO: 144, SEQ ID NO: 145, SEQ ID NO: 146, SEQ ID NO: 147; or amino acids 22-229 or amino acids 72-146 of SEQ ID NO: 143; or at most 1, 2, 3, 4, 5, 6, 7, 8, 9, 10, 15 or 20 non-contiguous amino acid deletions, additions, and/or substitutions relative to amino acids 53-73, amino acids 60-78, or amino acids 109-129 of SEQ ID NO: 117, SEQ ID NO: 118, SEQ ID NO: 119, SEQ ID NO: 120, SEQ ID NO: 121, or SEQ ID NO: 122, amino acids 49-69 or amino acids 96-111 of SEQ ID NO: 123 or SEQ ID NO: 124, amino acids 48-68 or amino acids 95-110 of SEQ ID NO: 125, amino acids 46-66 or amino acids 93-108 of SEQ ID NO: 126, amino acids 47-67 or amino acids 94-109 of SEQ ID NO: 127, amino acids 43-63 or amino acids 90-105 of SEQ ID NO: 128, amino acids 97-117 or amino acids 159-173 of SEQ ID NO: 129, SEQ ID NO: 130, SEQ ID NO: 131, or SEQ ID NO: 136, amino acids 85-114 or amino acids 150-171 of SEQ ID NO: 132, SEQ ID NO: 133, SEQ ID NO: 134, amino acids 83-103 or amino acids 144-158 of SEQ ID NO: 135, amino acids 53-73 or amino acids 115-135 of SEQ ID NO: 137, or amino acids 8-33 of SEQ ID NO 138; or amino acids 22-184, amino acids 26-100, amino acids 46-100, or amino acids 72-146 of SEQ ID NO: 139, SEQ ID NO: 140, SEQ ID NO: 141, SEQ ID NO: 142, SEQ ID NO: 144, SEQ ID NO: 145, SEQ ID NO: 146, SEQ ID NO: 147; or amino acids 22-229 or amino acids 72-146 of SEQ ID NO: 143. In still other aspects of this embodiment, an endothelin targeting domain or an ECSM targeting domain comprises a polypeptide having, e.g., at least 1, 2, 3, 4, 5, 6, 7, 8, 9, 10, 15 or 20 contiguous amino acid deletions, additions, and/or substitutions relative to amino acids 53-73, amino acids 60-78, or amino acids 109-129 of SEQ ID NO: 117, SEQ ID NO: 118, SEQ ID NO: 119, SEQ ID NO: 120, SEQ ID NO: 121, or SEQ ID NO: 122, amino acids 49-69 or amino acids 96-111 of SEQ ID NO: 123 or SEQ ID NO: 124, amino acids 48-68 or amino acids 95-110 of SEQ ID NO: 125, amino acids 46-66 or amino acids 93-108 of SEQ ID NO: 126, amino acids 47-67 or amino acids 94-109 of SEQ ID NO: 127, amino acids 43-63 or amino acids 90-105 of SEQ ID NO: 128, amino acids 97-117 or amino acids 159-173 of SEQ ID NO: 129, SEQ ID NO: 130, SEQ ID NO: 131, or SEQ ID NO: 136, amino acids 85-114 or amino acids 150-171 of SEQ ID NO: 132, SEQ ID NO: 133, SEQ ID NO: 134, amino acids 83-103 or amino acids 144-158 of SEQ ID NO: 135, amino acids 53-73 or amino acids 115-135 of SEQ ID NO: 137, or amino acids 8-33 of SEQ ID NO 138; or amino acids 22-184, amino acids 26-100, amino acids 46-100, or amino acids 72-146 of SEQ ID NO: 139, SEQ ID NO: 140, SEQ ID NO: 141, SEQ ID NO: 142, SEQ ID NO: 144, SEQ ID NO: 145, SEQ ID NO: 146, SEQ ID NO: 147; or amino acids 22-229 or amino acids 72-146 of SEQ ID NO: 143; or at most 1, 2, 3, 4, 5, 6, 7, 8, 9, 10, 15 or 20 contiguous amino acid deletions, additions, and/or substitutions relative to amino acids 53-73, amino acids 60-78, or amino acids 109-129 of SEQ ID NO: 117, SEQ ID NO: 118, SEQ ID NO: 119, SEQ ID NO: 120, SEQ ID NO: 121, or SEQ ID NO: 122, amino acids 49-69 or amino acids 96-111 of SEQ ID NO: 123 or SEQ ID NO: 124, amino acids 48-68 or amino acids 95-110 of SEQ ID NO: 125, amino acids 46-66 or amino acids 93-108 of SEQ ID NO: 126, amino acids 47-67 or amino acids 94-109 of SEQ ID NO: 127, amino acids 43-63 or amino acids 90-105 of SEQ ID NO: 128, amino acids 97-117 or amino acids 159-173 of SEQ ID NO: 129, SEQ ID NO: 130, SEQ ID NO: 131, or SEQ ID NO: 136, amino acids 85-114 or amino acids 150-171 of SEQ ID NO: 132, SEQ ID NO: 133, SEQ ID NO: 134, amino acids 83-103 or amino acids 144-158 of SEQ ID NO: 135, amino acids 53-73 or amino acids 115-135 of SEQ ID NO: 137, or amino acids 8-33 of SEQ ID NO 138; or amino acids 22-184, amino acids 26-100, amino acids 46-100, or amino acids 72-146 of SEQ ID NO: 139, SEQ ID NO: 140, SEQ ID NO: 141, SEQ ID NO: 142, SEQ ID NO: 144, SEQ ID NO: 145, SEQ ID NO: 146, SEQ ID NO: 147; or amino acids 22-229 or amino acids 72-146 of SEQ ID NO: 143.

[0138] An example of a targeting domain disclosed herein is an ephrin targeting domain. Non-limiting examples of an ephrin targeting domain include an ephrin-A1 targeting domain and an ephrin-B2 targeting domain. Ephrin targeting domains bind to transmembrane receptors present on the surface of endothelial cells associated with aberrant new blood vessel formation. For example, ephrin receptors like ephrin-A2 receptor, ephrin-A3 receptor and ephrin-A4 receptor, ephrin-B2 receptor and ephrin-B4 receptor are expressed in endothelial cells undergoing angiogenesis in response to tumor progression, as well as endothelial cells participating in angiogenesis and neovasculogenesis associated with several disorders including ocular disorders. As such, a TVEMP comprising an ephrin targeting domain would be effective in treating a disease or disorder associated with aberrant new blood vessel formation.

[0139] Thus, in an embodiment, a targeting domain comprises an ephrin targeting domain. In aspects of this embodiment, an ephrin targeting domain comprises an ephrin-A1 targeting domain and an ephrin-B2 targeting domain. In other aspects of this embodiment, an ephrin targeting domain comprises SEQ ID NO: 148, SEQ ID NO: 149, SEQ ID NO: 150, SEQ ID NO: 151, SEQ ID NO: 152, SEQ ID NO: 153, or SEQ ID NO: 154. In yet other aspects of this embodiment, an ephrin targeting domain comprises amino acids 17-152 or amino acids 17-136 of SEQ ID NO: 148, SEQ ID NO: 149, SEQ ID NO: 150, or SEQ ID NO: 151; amino acids 34-170 of SEQ ID NO: 152 or SEQ ID NO: 153; or amino acids 30-170 of SEQ ID NO: 154.

[0140] In other aspects of this embodiment, an ephrin targeting domain comprises a polypeptide having an amino acid identity of, e.g., at least 70%, at least 75%, at least 80%, at least 85%, at least 90% or at least 95% to SEQ ID NO: 148, SEQ ID NO: 149, SEQ ID NO: 150, SEQ ID NO: 151, SEQ ID NO: 152, SEQ ID NO: 153, or SEQ ID NO: 154; or at most 70%, at most 75%, at most 80%, at most 85%, at most 90% or at most 95% to SEQ ID NO: 148, SEQ ID NO: 149, SEQ ID NO: 150, SEQ ID NO: 151, SEQ ID NO: 152, SEQ ID NO: 153, or SEQ ID NO: 154. In yet other aspects of this embodiment, an ephrin targeting domain comprises a polypeptide having, e.g., at least 1, 2, 3, 4, 5, 6, 7, 8, 9, 10, 15 or 20 non-contiguous amino acid deletions, additions, and/or substitutions relative to SEQ ID NO: 148, SEQ ID NO: 149, SEQ ID NO: 150, SEQ ID NO: 151, SEQ ID NO: 152, SEQ ID NO: 153, or SEQ ID NO: 154; or at most 1, 2, 3, 4, 5, 6, 7, 8, 9, 10, 15 or 20 non-contiguous amino acid deletions, additions, and/or substitutions relative to SEQ ID NO: 148, SEQ ID NO: 149, SEQ ID NO: 150, SEQ ID NO: 151, SEQ ID NO: 152, SEQ ID NO: 153, or SEQ ID NO: 154. In still other aspects of this embodiment, an ephrin targeting domain comprises a polypeptide having, e.g., at least 1, 2, 3, 4, 5, 6, 7, 8, 9, 10, 15 or 20 contiguous amino acid deletions, additions, and/or substitutions relative to SEQ ID NO: 148, SEQ ID NO: 149, SEQ ID NO: 150, SEQ ID NO: 151, SEQ ID NO: 152, SEQ ID NO: 153, or SEQ ID NO: 154; or at most 1, 2, 3, 4, 5, 6, 7, 8, 9, 10, 15 or 20 contiguous amino acid deletions, additions, and/or substitutions relative to SEQ ID NO: 148, SEQ ID NO: 149, SEQ ID NO: 150, SEQ ID NO: 151, SEQ ID NO: 152, SEQ ID NO: 153, or SEQ ID NO: 154.

[0141] In other aspects of this embodiment, an ephrin targeting domain comprises a polypeptide having an amino acid identity of, e.g., at least 70%, at least 75%, at least 80%, at least 85%, at least 90% or at least 95% to amino acids 17-152 or amino acids 17-136 of SEQ ID NO: 148, SEQ ID NO: 149, SEQ ID NO: 150, or SEQ ID NO: 151; amino acids 34-170 of SEQ ID NO: 152 or SEQ ID NO: 153; or amino acids 30-170 of SEQ ID NO: 154; or at most 70%, at most 75%, at most 80%, at most 85%, at most 90% or at most 95% to amino acids 17-152 or amino acids 17-136 of SEQ ID NO: 148, SEQ ID NO: 149, SEQ ID NO: 150, or SEQ ID NO: 151; amino acids 34-170 of SEQ ID NO: 152 or SEQ ID NO: 153; or amino acids 30-170 of SEQ ID NO: 154. In yet other aspects of this embodiment, an ephrin targeting domain comprises a polypeptide having, e.g., at least 1, 2, 3, 4, 5, 6, 7, 8, 9, 10, 15 or 20 non-contiguous amino acid deletions, additions, and/or substitutions relative to amino acids 17-152 or amino acids 17-136 of SEQ ID NO: 148, SEQ ID NO: 149, SEQ ID NO: 150, or SEQ ID NO: 151; amino acids 34-170 of SEQ ID NO: 152 or SEQ ID NO: 153; or amino acids 30-170 of SEQ ID NO: 154; or at most 1, 2, 3, 4, 5, 6, 7, 8, 9, 10, 15 or 20 non-contiguous amino acid deletions, additions, and/or substitutions relative to amino acids 17-152 or amino acids 17-136 of SEQ ID NO: 148, SEQ ID NO: 149, SEQ ID NO: 150, or SEQ ID NO: 151; amino acids 34-170 of SEQ ID NO: 152 or SEQ ID NO: 153; or amino acids 30-170 of SEQ ID NO: 154. In still other aspects of this embodiment, an ephrin targeting domain comprises a polypeptide having, e.g., at least 1, 2, 3, 4, 5, 6, 7, 8, 9, 10, 15 or 20 contiguous amino acid deletions, additions, and/or substitutions relative to amino acids 17-152 or amino acids 17-136 of SEQ ID NO: 148, SEQ ID NO: 149, SEQ ID NO: 150, or SEQ ID NO: 151; amino acids 34-170 of SEQ ID NO: 152 or SEQ ID NO: 153; or amino acids 30-170 of SEQ ID NO: 154; or at most 1, 2, 3, 4, 5, 6, 7, 8, 9, 10, 15 or 20 contiguous amino acid deletions, additions, and/or substitutions relative to amino acids 17-152 or amino acids 17-136 of SEQ ID NO: 148, SEQ ID NO: 149, SEQ ID NO: 150, or SEQ ID NO: 151; amino acids 34-170 of SEQ ID NO: 152 or SEQ ID NO: 153; or amino acids 30-170 of SEQ ID NO: 154.

[0142] An example of a targeting domain disclosed herein is an erythropoietin targeting domain. Erythropoietin targeting domains bind to transmembrane receptors present on the surface of endothelial cells associated with aberrant new blood vessel formation. For example, erythropoietin receptors are expressed in endothelial cells participating in angiogenesis and neovasculogenesis associated with several disorders including ocular disorders. As such, a TVEMP comprising an erythropoietin targeting domain would be effective in treating a disease or disorder associated with aberrant new blood vessel formation.

[0143] Thus, in an embodiment, a targeting domain comprises an erythropoietin targeting domain. In aspects of this embodiment, an erythropoietin targeting domain comprises SEQ ID NO: 155, SEQ ID NO: 156, or SEQ ID NO: 157. In yet other aspects of this embodiment, an erythropoietin targeting domain comprises amino acids 33-193 of SEQ ID NO: 155; or amino acids 26-192 of SEQ ID NO: 156 or SEQ ID NO: 157.

[0144] In other aspects of this embodiment, an erythropoietin targeting domain comprises a polypeptide having an amino acid identity of, e.g., at least 70%, at least 75%, at least 80%, at least 85%, at least 90% or at least 95% to SEQ ID NO: 155, SEQ ID NO: 156, or SEQ ID NO: 157; or at most 70%, at most 75%, at most 80%, at most 85%, at most 90% or at most 95% to SEQ ID NO: 155, SEQ ID NO: 156, or SEQ ID NO: 157. In yet other aspects of this embodiment, an erythropoietin targeting domain comprises a polypeptide having, e.g., at least 1, 2, 3, 4, 5, 6, 7, 8, 9, 10, 15 or 20 non-contiguous amino acid deletions, additions, and/or substitutions relative to SEQ ID NO: 155, SEQ ID NO: 156, or SEQ ID NO: 157; or at most 1, 2, 3, 4, 5, 6, 7, 8, 9, 10, 15 or 20 non-contiguous amino acid deletions, additions, and/or substitutions relative to SEQ ID NO: 155, SEQ ID NO: 156, or SEQ ID NO: 157. In still other aspects of this embodiment, an erythropoietin targeting domain comprises a polypeptide having, e.g., at least 1, 2, 3, 4, 5, 6, 7, 8, 9, 10, 15 or 20 contiguous amino acid deletions, additions, and/or substitutions relative to SEQ ID NO: 155, SEQ ID NO: 156, or SEQ ID NO: 157; or at most 1, 2, 3, 4, 5, 6, 7, 8, 9, 10, 15 or 20 contiguous amino acid deletions, additions, and/or substitutions relative to SEQ ID NO: 155, SEQ ID NO: 156, or SEQ ID NO: 157.

[0145] In other aspects of this embodiment, an erythropoietin targeting domain comprises a polypeptide having an amino acid identity of, e.g., at least 70%, at least 75%, at least 80%, at least 85%, at least 90% or at least 95% to amino acids 33-193 of SEQ ID NO: 155; or amino acids 26-192 of SEQ ID NO: 156 or SEQ ID NO: 157; or at most 70%, at most 75%, at most 80%, at most 85%, at most 90% or at most 95% to amino acids 33-193 of SEQ ID NO: 155; or amino acids 26-192 of SEQ ID NO: 156 or SEQ ID NO: 157. In yet other aspects of this embodiment, an erythropoietin targeting domain comprises a polypeptide having, e.g., at least 1, 2, 3, 4, 5, 6, 7, 8, 9, 10, 15 or 20 non-contiguous amino acid deletions, additions, and/or substitutions relative to amino acids 33-193 of SEQ ID NO: 155; or amino acids 26-192 of SEQ ID NO: 156 or SEQ ID NO: 157; or at most 1, 2, 3, 4, 5, 6, 7, 8, 9, 10, 15 or 20 non-contiguous amino acid deletions, additions, and/or substitutions relative to amino acids 33-193 of SEQ ID NO: 155; or amino acids 26-192 of SEQ ID NO: 156 or SEQ ID NO: 157. In still other aspects of this embodiment, an erythropoietin targeting domain comprises a polypeptide having, e.g., at least 1, 2, 3, 4, 5, 6, 7, 8, 9, 10, 15 or 20 contiguous amino acid deletions, additions, and/or substitutions relative to amino acids 33-193 of SEQ ID NO: 155; or amino acids 26-192 of SEQ ID NO: 156 or SEQ ID NO: 157; or at most 1, 2, 3, 4, 5, 6, 7, 8, 9, 10, 15 or 20 contiguous amino acid deletions, additions, and/or substitutions relative to amino acids 33-193 of SEQ ID NO: 155; or amino acids 26-192 of SEQ ID NO: 156 or SEQ ID NO: 157.

[0146] An example of a targeting domain disclosed herein is a hepatocyte growth factor (HGF) targeting domain. Non-limiting examples of a HGF targeting domain include a HGF targeting domain, a NK1 targeting domain, a NK2 targeting domain, a NK3 targeting domain, and a NK4 targeting domain. HGF targeting domains bind to transmembrane receptors present on the surface of endothelial cells associated with aberrant new blood vessel formation. For example, HGF receptors like HGF c-met are expressed in endothelial cells undergoing angiogenesis in response to tumor progression, as well as in endothelial cells participating in angiogenesis and neovasculogenesis associated with several disorders including ocular disorders and skin disorders. As such, a TVEMP comprising a HGF targeting domain would be effective in treating a disease or disorder associated with aberrant new blood vessel formation.

[0147] Thus, in an embodiment, a targeting domain comprises a HGF targeting domain. In aspects of this embodiment, a HGF targeting domain comprises a HGF targeting domain, a NK1 targeting domain, a NK2 targeting domain, a NK3 targeting domain, and a NK4 targeting domain. In other aspects of this embodiment, a HGF targeting domain comprises SEQ ID NO: 158, SEQ ID NO: 159, SEQ ID NO: 160, SEQ ID NO: 161, SEQ ID NO: 162, SEQ ID NO: 163, SEQ ID NO: 164, SEQ ID NO: 165, SEQ ID NO: 166, SEQ ID NO: 167, SEQ ID NO: 168, SEQ ID NO: 169, SEQ ID NO: 171, or SEQ ID NO: 172.

[0148] In other aspects of this embodiment, a HGF targeting domain comprises a polypeptide having an amino acid identity of, e.g., at least 70%, at least 75%, at least 80%, at least 85%, at least 90% or at least 95% to SEQ ID NO: 158, SEQ ID NO: 159, SEQ ID NO: 160, SEQ ID NO: 161, SEQ ID NO: 162, SEQ ID NO: 163, SEQ ID NO: 164, SEQ ID NO: 165, SEQ ID NO: 166, SEQ ID NO: 167, SEQ ID NO: 168, SEQ ID NO: 169, SEQ ID NO: 171, or SEQ ID NO: 172; or at most 70%, at most 75%, at most 80%, at most 85%, at most 90% or at most 95% to SEQ ID NO: 158, SEQ ID NO: 159, SEQ ID NO: 160, SEQ ID NO: 161, SEQ ID NO: 162, SEQ ID NO: 163, SEQ ID NO: 164, SEQ ID NO: 165, SEQ ID NO: 166, SEQ ID NO: 167, SEQ ID NO: 168, SEQ ID NO: 169, SEQ ID NO: 171, or SEQ ID NO: 17257. In yet other aspects of this embodiment, a HGF targeting domain comprises a polypeptide having, e.g., at least 1, 2, 3, 4, 5, 6, 7, 8, 9, 10, 15 or 20 non-contiguous amino acid deletions, additions, and/or substitutions relative to SEQ ID NO: 158, SEQ ID NO: 159, SEQ ID NO: 160, SEQ ID NO: 161, SEQ ID NO: 162, SEQ ID NO: 163, SEQ ID NO: 164, SEQ ID NO: 165, SEQ ID NO: 166, SEQ ID NO: 167, SEQ ID NO: 168, SEQ ID NO: 169, SEQ ID NO: 171, or SEQ ID NO: 172; or at most 1, 2, 3, 4, 5, 6, 7, 8, 9, 10, 15 or 20 non-contiguous amino acid deletions, additions, and/or substitutions relative to SEQ ID NO: 158, SEQ ID NO: 159, SEQ ID NO: 160, SEQ ID NO: 161, SEQ ID NO: 162, SEQ ID NO: 163, SEQ ID NO: 164, SEQ ID NO: 165, SEQ ID NO: 166, SEQ ID NO: 167, SEQ ID NO: 168, SEQ ID NO: 169, SEQ ID NO: 171, or SEQ ID NO: 172. In still other aspects of this embodiment, a HGF targeting domain comprises a polypeptide having, e.g., at least 1, 2, 3, 4, 5, 6, 7, 8, 9, 10, 15 or 20 contiguous amino acid deletions, additions, and/or substitutions relative to SEQ ID NO: 158, SEQ ID NO: 159, SEQ ID NO: 160, SEQ ID NO: 161, SEQ ID NO: 162, SEQ ID NO: 163, SEQ ID NO: 164, SEQ ID NO: 165, SEQ ID NO: 166, SEQ ID NO: 167, SEQ ID NO: 168, SEQ ID NO: 169, SEQ ID NO: 171, or SEQ ID NO: 172; or at most 1, 2, 3, 4, 5, 6, 7, 8, 9, 10, 15 or 20 contiguous amino acid deletions, additions, and/or substitutions relative to SEQ ID NO: 158, SEQ ID NO: 159, SEQ ID NO: 160, SEQ ID NO: 161, SEQ ID NO: 162, SEQ ID NO: 163, SEQ ID NO: 164, SEQ ID NO: 165, SEQ ID NO: 166, SEQ ID NO: 167, SEQ ID NO: 168, SEQ ID NO: 169, SEQ ID NO: 171, or SEQ ID NO: 172.

[0149] An example of a targeting domain disclosed herein is a netrin targeting domain. Non-limiting examples of a netrin targeting domain include a netrin-1 targeting domain, a netrin-2 targeting domain, a netrin-3 targeting domain, a netrin-4 targeting domain, a netrin-5 targeting domain, a netrin-G1 targeting domain, and a netrin-G2 targeting domain. Netrin targeting domains bind to transmembrane receptors present on the surface of endothelial cells associated with aberrant new blood vessel formation. For example, netrin receptors are expressed in endothelial cells undergoing angiogenesis in response to tumor progression, as well as in endothelial cells participating in angiogenesis and neovasculogenesis associated with several disorders including ocular disorders. As such, a TVEMP comprising a netrin targeting domain would be effective in treating a disease or disorder associated with aberrant new blood vessel formation.

173-216

[0150] Thus, in an embodiment, a targeting domain comprises a netrin targeting domain. In aspects of this embodiment, a netrin targeting domain is a netrin-1 targeting domain, a netrin-2 targeting domain, a netrin-3 targeting domain, a netrin-4 targeting domain, a netrin-5 targeting domain, a netrin-G1 targeting domain, and a netrin-G2 targeting domain. In aspects of this embodiment, a netrin targeting domain comprises SEQ ID NO: 173, SEQ ID NO: 174, SEQ ID NO: 175, SEQ ID NO: 176, SEQ ID NO: 177, SEQ ID NO: 178, SEQ ID NO: 179, SEQ ID NO: 180, SEQ ID NO: 181, SEQ ID NO: 182, SEQ ID NO: 183, SEQ ID NO: 184, SEQ ID NO: 185, SEQ ID NO: 186, SEQ ID NO: 187, SEQ ID NO: 188, SEQ ID NO: 189, SEQ ID NO: 190, SEQ ID NO: 191, SEQ ID NO: 192, SEQ ID NO: 193, SEQ ID NO: 194, SEQ ID NO: 195, SEQ ID NO: 196, SEQ ID NO: 197, SEQ ID NO: 198, SEQ ID NO: 199, SEQ ID NO: 200, SEQ ID NO: 201, SEQ ID NO: 202, SEQ ID NO: 203, SEQ ID NO: 204, SEQ ID NO: 205, SEQ ID NO: 206, SEQ ID NO: 207, SEQ ID NO: 208, SEQ ID NO: 209, SEQ ID NO: 210, SEQ ID NO: 211, SEQ ID NO: 212, SEQ ID NO: 213, SEQ ID NO: 214, SEQ ID NO: 215, or SEQ ID NO: 216.

[0151] In yet other aspects of this embodiment, a netrin targeting domain comprises amino acids 26-604; 46-283, amino acids 285-328, amino acids 341-390, amino acids 403-451, or amino acids 487-601 of SEQ ID NO: 173, SEQ ID NO: 174, SEQ ID NO: 177, amino acids 26-603, amino acids 45-282, amino acids 284-327, amino acids 340-389, or amino acids 486-600 of SEQ ID NO: 175, amino acids 25-600, amino acids 46-283, amino acids 285-328, amino acids 403-451, or amino acids 487-598 of SEQ ID NO: 176, amino acids 26-605, amino acids 46-283, amino acids 285-328, amino acids 341-390, amino acids 403-451, or amino acids 487-601 of SEQ ID NO: 178, amino acids 26-606, amino acids 47-285, amino acids 287-330, amino acids 343-392, amino acids 405-453, or amino acids 489-603 of SEQ ID NO: 179; amino acids 34-253, amino acids 254-299, amino acids 373-422, or amino acids 456-562 of SEQ ID NO: 180, amino acids 15-581, amino acids 33-306, amino acids 262-305, amino acids 318-387, amino acids 380-428, or amino acids 464-563 of SEQ ID NO: 181; amino acids 28-580, amino acids 34-253, amino acids 254-299, amino acids 373-422, or amino acids 456-562 of SEQ ID NO: 182, SEQ ID NO: 183, SEQ ID NO: 184, or SEQ ID NO: 185; amino acids 19-628, amino acids 29-260, amino acids 262-321, amino acids 332-385, amino acids 395-445, or amino acids 516-626 of SEQ ID NO: 186 or SEQ ID NO: 189, amino acids 19-627, amino acids 29-260, amino acids 261-320, amino acids 332-392, amino acids 395-445, or amino acids 515-625 of SEQ ID NO: 187, amino acids 19-637, amino acids 37-269, amino acids 270-329, amino acids 341-396, amino acids 404-454, amino acids 525-635 of SEQ ID NO: 188, amino acids 19-630, amino acids 28-260, amino acids 261-320, amino acids 332-385, amino acids 394-445, amino acids 395-446, amino acids 517-626 of SEQ ID NO: 190, amino acids 19-778, amino acids 128-410, amino acids 412-470, amino acids 481-537, amino acids 545-595, amino acids 666-776 of SEQ ID NO: 191; amino acids 17-489, amino acids 211-265, amino acids 274-323, amino acids 360-475 of SEQ ID NO: 192 and SEQ ID NO: 193, amino acids 17-452, amino acids 172-216, amino acids 234-276, or amino acids 313-438 of SEQ ID NO: 194, amino acids 17-456, amino acids 172-216, amino acids 234-276, or amino acids 313-442 of SEQ ID NO: 195; amino acids 29-539, amino acids 29-510, amino acids 71-295, amino acids 297-341, or amino acids 420-467 of SEQ ID NO: 196, amino acids 29-480, amino acids 71-295, or amino acids 297-341 of SEQ ID NO: 197, amino acids 29-438, amino acids 71-295, or amino acids 297-341 of SEQ ID NO: 198, amino acids 76-123 of SEQ ID NO: 199, amino acids 20-55 of SEQ ID NO: 200, amino acids 118-153 of SEQ ID NO: 205, amino acids 41-77 of SEQ ID NO: 206, amino acids 62-97 of SEQ ID NO: 207, amino acids 19-510, amino acids 71-295, amino acids 276-341, or amino acids 420-455 of SEQ ID NO: 208, amino acids 19-483, amino acids 71-295, amino acids 297-341, or amino acids 364-411 of SEQ ID NO: 209, amino acids 19-438, amino acids 71-295, amino acids 297-341, or amino acids 364-411 of SEQ ID NO: 210, amino acids 19-480, amino acids 71-295, amino acids 297-341, or amino acids 364-411 of SEQ ID NO: 211, amino acids 19-460, amino acids 71-295, amino acids 297-341, or amino acids 364-411 of SEQ ID NO: 212, amino acids 19-364, amino acids 71-295, or amino acids 297-341 of SEQ ID NO: 213; amino acids 18-530, amino acids 18-507, amino acids 60-285, or amino acids 408-446 of SEQ ID NO: 214, SEQ ID NO: 215, or SEQ ID NO: 216.

[0152] In other aspects of this embodiment, a netrin targeting domain comprises a polypeptide having an amino acid identity of, e.g., at least 70%, at least 75%, at least 80%, at least 85%, at least 90% or at least 95% to SEQ ID NO: 173, SEQ ID NO: 174, SEQ ID NO: 175, SEQ ID NO: 176, SEQ ID NO: 177, SEQ ID NO: 178, SEQ ID NO: 179, SEQ ID NO: 180, SEQ ID NO: 181, SEQ ID NO: 182, SEQ ID NO: 183, SEQ ID NO: 184, SEQ ID NO: 185, SEQ ID NO: 186, SEQ ID NO: 187, SEQ ID NO: 188, SEQ ID NO: 189, SEQ ID NO: 190, SEQ ID NO: 191, SEQ ID NO: 192, SEQ ID NO: 193, SEQ ID NO: 194, SEQ ID NO: 195, SEQ ID NO: 196, SEQ ID NO: 197, SEQ ID NO: 198, SEQ ID NO: 199, SEQ ID NO: 200, SEQ ID NO: 201, SEQ ID NO: 202, SEQ ID NO: 203, SEQ ID NO: 204, SEQ ID NO: 205, SEQ ID NO: 206, SEQ ID NO: 207, SEQ ID NO: 208, SEQ ID NO: 209, SEQ ID NO: 210, SEQ ID NO: 211, SEQ ID NO: 212, SEQ ID NO: 213, SEQ ID NO: 214, SEQ ID NO: 215, or SEQ ID NO: 216; or at most 70%, at most 75%, at most 80%, at most 85%, at most 90% or at most 95% to SEQ ID NO: 173, SEQ ID NO: 174, SEQ ID NO: 175, SEQ ID NO: 176, SEQ ID NO: 177, SEQ ID NO: 178, SEQ ID NO: 179, SEQ ID NO: 180, SEQ ID NO: 181, SEQ ID NO: 182, SEQ ID NO: 183, SEQ ID NO: 184, SEQ ID NO: 185, SEQ ID NO: 186, SEQ ID NO: 187, SEQ ID NO: 188, SEQ ID NO: 189, SEQ ID NO: 190, SEQ ID NO: 191, SEQ ID NO: 192, SEQ ID NO: 193, SEQ ID NO: 194, SEQ ID NO: 195, SEQ ID NO: 196, SEQ ID NO: 197, SEQ ID NO: 198, SEQ ID NO: 199, SEQ ID NO: 200, SEQ ID NO: 201, SEQ ID NO: 202, SEQ ID NO: 203, SEQ ID NO: 204, SEQ ID NO: 205, SEQ ID NO: 206, SEQ ID NO: 207, SEQ ID NO: 208, SEQ ID NO: 209, SEQ ID NO: 210, SEQ ID NO: 211, SEQ ID NO: 212, SEQ ID NO: 213, SEQ ID NO: 214, SEQ ID NO: 215, or SEQ ID NO: 216. In yet other aspects of this embodiment, a netrin targeting domain comprises a polypeptide having, e.g., at least 1, 2, 3, 4, 5, 6, 7, 8, 9, 10, 15 or 20 non-contiguous amino acid deletions, additions, and/or substitutions relative to SEQ ID NO: 173, SEQ ID NO: 174, SEQ ID NO: 175, SEQ ID NO: 176, SEQ ID NO: 177, SEQ ID NO: 178, SEQ ID NO: 179, SEQ ID NO: 180, SEQ ID NO: 181, SEQ ID NO: 182, SEQ ID NO: 183, SEQ ID NO: 184, SEQ ID NO: 185, SEQ ID NO: 186, SEQ ID NO: 187, SEQ ID NO: 188, SEQ ID NO: 189, SEQ ID NO: 190, SEQ ID NO: 191, SEQ ID NO: 192, SEQ ID NO: 193, SEQ ID NO: 194, SEQ ID NO: 195, SEQ ID NO: 196, SEQ ID NO: 197, SEQ ID NO: 198, SEQ ID NO: 199, SEQ ID NO: 200, SEQ ID NO: 201, SEQ ID NO: 202, SEQ ID NO: 203, SEQ ID NO: 204, SEQ ID NO: 205, SEQ ID NO: 206, SEQ ID NO: 207, SEQ ID NO: 208, SEQ ID NO: 209, SEQ ID NO: 210, SEQ ID NO: 211, SEQ ID NO: 212, SEQ ID NO: 213, SEQ ID NO: 214, SEQ ID NO: 215, or SEQ ID NO: 216; or at most 1, 2, 3, 4, 5, 6, 7, 8, 9, 10, 15 or 20 non-contiguous amino acid deletions, additions, and/or substitutions relative to SEQ ID NO: 173, SEQ ID NO: 174, SEQ ID NO: 175, SEQ ID NO: 176, SEQ ID NO: 177, SEQ ID NO: 178, SEQ ID NO: 179, SEQ ID NO: 180, SEQ ID NO: 181, SEQ ID NO: 182, SEQ ID NO: 183, SEQ ID NO: 184, SEQ ID NO: 185, SEQ ID NO: 186, SEQ ID NO: 187, SEQ ID NO: 188, SEQ ID NO: 189, SEQ ID NO: 190, SEQ ID NO: 191, SEQ ID NO: 192, SEQ ID NO: 193, SEQ ID NO: 194, SEQ ID NO: 195, SEQ ID NO: 196, SEQ ID NO: 197, SEQ ID NO: 198, SEQ ID NO: 199, SEQ ID NO: 200, SEQ ID NO: 201, SEQ ID NO: 202, SEQ ID NO: 203, SEQ ID NO: 204, SEQ ID NO: 205, SEQ ID NO: 206, SEQ ID NO: 207, SEQ ID NO: 208, SEQ ID NO: 209, SEQ ID NO: 210, SEQ ID NO: 211, SEQ ID NO: 212, SEQ ID NO: 213, SEQ ID NO: 214, SEQ ID NO: 215, or SEQ ID NO: 216. In still other aspects of this embodiment, a netrin targeting domain comprises a polypeptide having, e.g., at least 1, 2, 3, 4, 5, 6, 7, 8, 9, 10, 15 or 20 contiguous amino acid deletions, additions, and/or substitutions relative to SEQ ID NO: 173, SEQ ID NO: 174, SEQ ID NO: 175, SEQ ID NO: 176, SEQ ID NO: 177, SEQ ID NO: 178, SEQ ID NO: 179, SEQ ID NO: 180, SEQ ID NO: 181, SEQ ID NO: 182, SEQ ID NO: 183, SEQ ID NO: 184, SEQ ID NO: 185, SEQ ID NO: 186, SEQ ID NO: 187, SEQ ID NO: 188, SEQ ID NO: 189, SEQ ID NO: 190, SEQ ID NO: 191, SEQ ID NO: 192, SEQ ID NO: 193, SEQ ID NO: 194, SEQ ID NO: 195, SEQ ID NO: 196, SEQ ID NO: 197, SEQ ID NO: 198, SEQ ID NO: 199, SEQ ID NO: 200, SEQ ID NO: 201, SEQ ID NO: 202, SEQ ID NO: 203, SEQ ID NO: 204, SEQ ID NO: 205, SEQ ID NO: 206, SEQ ID NO: 207, SEQ ID NO: 208, SEQ ID NO: 209, SEQ ID NO: 210, SEQ ID NO: 211, SEQ ID NO: 212, SEQ ID NO: 213, SEQ ID NO: 214, SEQ ID NO: 215, or SEQ ID NO: 216; or at most 1, 2, 3, 4, 5, 6, 7, 8, 9, 10, 15 or 20 contiguous amino acid deletions, additions, and/or substitutions relative to SEQ ID NO: 173, SEQ ID NO: 174, SEQ ID NO: 175, SEQ ID NO: 176, SEQ ID NO: 177, SEQ ID NO: 178, SEQ ID NO: 179, SEQ ID NO: 180, SEQ ID NO: 181, SEQ ID NO: 182, SEQ ID NO: 183, SEQ ID NO: 184, SEQ ID NO: 185, SEQ ID NO: 186, SEQ ID NO: 187, SEQ ID NO: 188, SEQ ID NO: 189, SEQ ID NO: 190, SEQ ID NO: 191, SEQ ID NO: 192, SEQ ID NO: 193, SEQ ID NO: 194, SEQ ID NO: 195, SEQ ID NO: 196, SEQ ID NO: 197, SEQ ID NO: 198, SEQ ID NO: 199, SEQ ID NO: 200, SEQ ID NO: 201, SEQ ID NO: 202, SEQ ID NO: 203, SEQ ID NO: 204, SEQ ID NO: 205, SEQ ID NO: 206, SEQ ID NO: 207, SEQ ID NO: 208, SEQ ID NO: 209, SEQ ID NO: 210, SEQ ID NO: 211, SEQ ID NO: 212, SEQ ID NO: 213, SEQ ID NO: 214, SEQ ID NO: 215, or SEQ ID NO: 216.

[0153] In other aspects of this embodiment, a netrin targeting domain comprises a polypeptide having an amino acid identity of, e.g., at least 70%, at least 75%, at least 80%, at least 85%, at least 90% or at least 95% to amino acids 26-604; 46-283, amino acids 285-328, amino acids 341-390, amino acids 403-451, or amino acids 487-601 of SEQ ID NO: 173, SEQ ID NO: 174, SEQ ID NO: 177, amino acids 26-603, amino acids 45-282, amino acids 284-327, amino acids 340-389, or amino acids 486-600 of SEQ ID NO: 175, amino acids 25-600, amino acids 46-283, amino acids 285-328, amino acids 403-451, or amino acids 487-598 of SEQ ID NO: 176, amino acids 26-605, amino acids 46-283, amino acids 285-328, amino acids 341-390, amino acids 403-451, or amino acids 487-601 of SEQ ID NO: 178, amino acids 26-606, amino acids 47-285, amino acids 287-330, amino acids 343-392, amino acids 405-453, or amino acids 489-603 of SEQ ID NO: 179; amino acids 34-253, amino acids 254-299, amino acids 373-422, or amino acids 456-562 of SEQ ID NO: 180, amino acids 15-581, amino acids 33-306, amino acids 262-305, amino acids 318-387, amino acids 380-428, or amino acids 464-563 of SEQ ID NO: 181; amino acids 28-580, amino acids 34-253, amino acids 254-299, amino acids 373-422, or amino acids 456-562 of SEQ ID NO: 182, SEQ ID NO: 183, SEQ ID NO: 184, or SEQ ID NO: 185; amino acids 19-628, amino acids 29-260, amino acids 262-321, amino acids 332-385, amino acids 395-445, or amino acids 516-626 of SEQ ID NO: 186 or SEQ ID NO: 189, amino acids 19-627, amino acids 29-260, amino acids 261-320, amino acids 332-392, amino acids 395-445, or amino acids 515-625 of SEQ ID NO: 187, amino acids 19-637, amino acids 37-269, amino acids 270-329, amino acids 341-396, amino acids 404-454, amino acids 525-635 of SEQ ID NO: 188, amino acids 19-630, amino acids 28-260, amino acids 261-320, amino acids 332-385, amino acids 394-445, amino acids 395-446, amino acids 517-626 of SEQ ID NO: 190, amino acids 19-778, amino acids 128-410, amino acids 412-470, amino acids 481-537, amino acids 545-595, amino acids 666-776 of SEQ ID NO: 191; amino acids 17-489, amino acids 211-265, amino acids 274-323, amino acids 360-475 of SEQ ID NO: 192 and SEQ ID NO: 193, amino acids 17-452, amino acids 172-216, amino acids 234-276, or amino acids 313-438 of SEQ ID NO: 194, amino acids 17-456, amino acids 172-216, amino acids 234-276, or amino acids 313-442 of SEQ ID NO: 195; amino acids 29-539, amino acids 29-510, amino acids 71-295, amino acids 297-341, or amino acids 420-467 of SEQ ID NO: 196, amino acids 29-480, amino acids 71-295, or amino acids 297-341 of SEQ ID NO: 197, amino acids 29-438, amino acids 71-295, or amino acids 297-341 of SEQ ID NO: 198, amino acids 76-123 of SEQ ID NO: 199, amino acids 20-55 of SEQ ID NO: 200, amino acids 118-153 of SEQ ID NO: 205, amino acids 41-77 of SEQ ID NO: 206, amino acids 62-97 of SEQ ID NO: 207, amino acids 19-510, amino acids 71-295, amino acids 276-341, or amino acids 420-455 of SEQ ID NO: 208, amino acids 19-483, amino acids 71-295, amino acids 297-341, or amino acids 364-411 of SEQ ID NO: 209, amino acids 19-438, amino acids 71-295, amino acids 297-341, or amino acids 364-411 of SEQ ID NO: 210, amino acids 19-480, amino acids 71-295, amino acids 297-341, or amino acids 364-411 of SEQ ID NO: 211, amino acids 19-460, amino acids 71-295, amino acids 297-341, or amino acids 364-411 of SEQ ID NO: 212, amino acids 19-364, amino acids 71-295, or amino acids 297-341 of SEQ ID NO: 213; amino acids 18-530, amino acids 18-507, amino acids 60-285, or amino acids 408-446 of SEQ ID NO: 214, SEQ ID NO: 215, or SEQ ID NO: 216; or at most 70%, at most 75%, at most 80%, at most 85%, at most 90% or at most 95% to amino acids 26-604; 46-283, amino acids 285-328, amino acids 341-390, amino acids 403-451, or amino acids 487-601 of SEQ ID NO: 173, SEQ ID NO: 174, SEQ ID NO: 177, amino acids 26-603, amino acids 45-282, amino acids 284-327, amino acids 340-389, or amino acids 486-600 of SEQ ID NO: 175, amino acids 25-600, amino acids 46-283, amino acids 285-328, amino acids 403-451, or amino acids 487-598 of SEQ ID NO: 176, amino acids 26-605, amino acids 46-283, amino acids 285-328, amino acids 341-390, amino acids 403-451, or amino acids 487-601 of SEQ ID NO: 178, amino acids 26-606, amino acids 47-285, amino acids 287-330, amino acids 343-392, amino acids 405-453, or amino acids 489-603 of SEQ ID NO: 179; amino acids 34-253, amino acids 254-299, amino acids 373-422, or amino acids 456-562 of SEQ ID NO: 180, amino acids 15-581, amino acids 33-306, amino acids 262-305, amino acids 318-387, amino acids 380-428, or amino acids 464-563 of SEQ ID NO: 181; amino acids 28-580, amino acids 34-253, amino acids 254-299, amino acids 373-422, or amino acids 456-562 of SEQ ID NO: 182, SEQ ID NO: 183, SEQ ID NO: 184, or SEQ ID NO: 185; amino acids 19-628, amino acids 29-260, amino acids 262-321, amino acids 332-385, amino acids 395-445, or amino acids 516-626 of SEQ ID NO: 186 or SEQ ID NO: 189, amino acids 19-627, amino acids 29-260, amino acids 261-320, amino acids 332-392, amino acids 395-445, or amino acids 515-625 of SEQ ID NO: 187, amino acids 19-637, amino acids 37-269, amino acids 270-329, amino acids 341-396, amino acids 404-454, amino acids 525-635 of SEQ ID NO: 188, amino acids 19-630, amino acids 28-260, amino acids 261-320, amino acids 332-385, amino acids 394-445, amino acids 395-446, amino acids 517-626 of SEQ ID NO: 190, amino acids 19-778, amino acids 128-410, amino acids 412-470, amino acids 481-537, amino acids 545-595, amino acids 666-776 of SEQ ID NO: 191; amino acids 17-489, amino acids 211-265, amino acids 274-323, amino acids 360-475 of SEQ ID NO: 192 and SEQ ID NO: 193, amino acids 17-452, amino acids 172-216, amino acids 234-276, or amino acids 313-438 of SEQ ID NO: 194, amino acids 17-456, amino acids 172-216, amino acids 234-276, or amino acids 313-442 of SEQ ID NO: 195; amino acids 29-539, amino acids 29-510, amino acids 71-295, amino acids 297-341, or amino acids 420-467 of SEQ ID NO: 196, amino acids 29-480, amino acids 71-295, or amino acids 297-341 of SEQ ID NO: 197, amino acids 29-438, amino acids 71-295, or amino acids 297-341 of SEQ ID NO: 198, amino acids 76-123 of SEQ ID NO: 199, amino acids 20-55 of SEQ ID NO: 200, amino acids 118-153 of SEQ ID NO: 205, amino acids 41-77 of SEQ ID NO: 206, amino acids 62-97 of SEQ ID NO: 207, amino acids 19-510, amino acids 71-295, amino acids 276-341, or amino acids 420-455 of SEQ ID NO: 208, amino acids 19-483, amino acids 71-295, amino acids 297-341, or amino acids 364-411 of SEQ ID NO: 209, amino acids 19-438, amino acids 71-295, amino acids 297-341, or amino acids 364-411 of SEQ ID NO: 210, amino acids 19-480, amino acids 71-295, amino acids 297-341, or amino acids 364-411 of SEQ ID NO: 211, amino acids 19-460, amino acids 71-295, amino acids 297-341, or amino acids 364-411 of SEQ ID NO: 212, amino acids 19-364, amino acids 71-295, or amino acids 297-341 of SEQ ID NO: 213; amino acids 18-530, amino acids 18-507, amino acids 60-285, or amino acids 408-446 of SEQ ID NO: 214, SEQ ID NO: 215, or SEQ ID NO: 216.

[0154] In yet other aspects of this embodiment, a netrin targeting domain comprises a polypeptide having, e.g., at least 1, 2, 3, 4, 5, 6, 7, 8, 9, 10, 15 or 20 non-contiguous amino acid deletions, additions, and/or substitutions relative to amino acids 26-604; 46-283, amino acids 285-328, amino acids 341-390, amino acids 403-451, or amino acids 487-601 of SEQ ID NO: 173, SEQ ID NO: 174, SEQ ID NO: 177, amino acids 26-603, amino acids 45-282, amino acids 284-327, amino acids 340-389, or amino acids 486-600 of SEQ ID NO: 175, amino acids 25-600, amino acids 46-283, amino acids 285-328, amino acids 403-451, or amino acids 487-598 of SEQ ID NO: 176, amino acids 26-605, amino acids 46-283, amino acids 285-328, amino acids 341-390, amino acids 403-451, or amino acids 487-601 of SEQ ID NO: 178, amino acids 26-606, amino acids 47-285, amino acids 287-330, amino acids 343-392, amino acids 405-453, or amino acids 489-603 of SEQ ID NO: 179; amino acids 34-253, amino acids 254-299, amino acids 373-422, or amino acids 456-562 of SEQ ID NO: 180, amino acids 15-581, amino acids 33-306, amino acids 262-305, amino acids 318-387, amino acids 380-428, or amino acids 464-563 of SEQ ID NO: 181; amino acids 28-580, amino acids 34-253, amino acids 254-299, amino acids 373-422, or amino acids 456-562 of SEQ ID NO: 182, SEQ ID NO: 183, SEQ ID NO: 184, or SEQ ID NO: 185; amino acids 19-628, amino acids 29-260, amino acids 262-321, amino acids 332-385, amino acids 395-445, or amino acids 516-626 of SEQ ID NO: 186 or SEQ ID NO: 189, amino acids 19-627, amino acids 29-260, amino acids 261-320, amino acids 332-392, amino acids 395-445, or amino acids 515-625 of SEQ ID NO: 187, amino acids 19-637, amino acids 37-269, amino acids 270-329, amino acids 341-396, amino acids 404-454, amino acids 525-635 of SEQ ID NO: 188, amino acids 19-630, amino acids 28-260, amino acids 261-320, amino acids 332-385, amino acids 394-445, amino acids 395-446, amino acids 517-626 of SEQ ID NO: 190, amino acids 19-778, amino acids 128-410, amino acids 412-470, amino acids 481-537, amino acids 545-595, amino acids 666-776 of SEQ ID NO: 191; amino acids 17-489, amino acids 211-265, amino acids 274-323, amino acids 360-475 of SEQ ID NO: 192 and SEQ ID NO: 193, amino acids 17-452, amino acids 172-216, amino acids 234-276, or amino acids 313-438 of SEQ ID NO: 194, amino acids 17-456, amino acids 172-216, amino acids 234-276, or amino acids 313-442 of SEQ ID NO: 195; amino acids 29-539, amino acids 29-510, amino acids 71-295, amino acids 297-341, or amino acids 420-467 of SEQ ID NO: 196, amino acids 29-480, amino acids 71-295, or amino acids 297-341 of SEQ ID NO: 197, amino acids 29-438, amino acids 71-295, or amino acids 297-341 of SEQ ID NO: 198, amino acids 76-123 of SEQ ID NO: 199, amino acids 20-55 of SEQ ID NO: 200, amino acids 118-153 of SEQ ID NO: 205, amino acids 41-77 of SEQ ID NO: 206, amino acids 62-97 of SEQ ID NO: 207, amino acids 19-510, amino acids 71-295, amino acids 276-341, or amino acids 420-455 of SEQ ID NO: 208, amino acids 19-483, amino acids 71-295, amino acids 297-341, or amino acids 364-411 of SEQ ID NO: 209, amino acids 19-438, amino acids 71-295, amino acids 297-341, or amino acids 364-411 of SEQ ID NO: 210, amino acids 19-480, amino acids 71-295, amino acids 297-341, or amino acids 364-411 of SEQ ID NO: 211, amino acids 19-460, amino acids 71-295, amino acids 297-341, or amino acids 364-411 of SEQ ID NO: 212, amino acids 19-364, amino acids 71-295, or amino acids 297-341 of SEQ ID NO: 213; amino acids 18-530, amino acids 18-507, amino acids 60-285, or amino acids 408-446 of SEQ ID NO: 214, SEQ ID NO: 215, or SEQ ID NO: 216; or at most 1, 2, 3, 4, 5, 6, 7, 8, 9, 10, 15 or 20 non-contiguous amino acid deletions, additions, and/or substitutions relative to amino acids 26-604; 46-283, amino acids 285-328, amino acids 341-390, amino acids 403-451, or amino acids 487-601 of SEQ ID NO: 173, SEQ ID NO: 174, SEQ ID NO: 177, amino acids 26-603, amino acids 45-282, amino acids 284-327, amino acids 340-389, or amino acids 486-600 of SEQ ID NO: 175, amino acids 25-600, amino acids 46-283, amino acids 285-328, amino acids 403-451, or amino acids 487-598 of SEQ ID NO: 176, amino acids 26-605, amino acids 46-283, amino acids 285-328, amino acids 341-390, amino acids 403-451, or amino acids 487-601 of SEQ ID NO: 178, amino acids 26-606, amino acids 47-285, amino acids 287-330, amino acids 343-392, amino acids 405-453, or amino acids 489-603 of SEQ ID NO: 179; amino acids 34-253, amino acids 254-299, amino acids 373-422, or amino acids 456-562 of SEQ ID NO: 180, amino acids 15-581, amino acids 33-306, amino acids 262-305, amino acids 318-387, amino acids 380-428, or amino acids 464-563 of SEQ ID NO: 181; amino acids 28-580, amino acids 34-253, amino acids 254-299, amino acids 373-422, or amino acids 456-562 of SEQ ID NO: 182, SEQ ID NO: 183, SEQ ID NO: 184, or SEQ ID NO: 185; amino acids 19-628, amino acids 29-260, amino acids 262-321, amino acids 332-385, amino acids 395-445, or amino acids 516-626 of SEQ ID NO: 186 or SEQ ID NO: 189, amino acids 19-627, amino acids 29-260, amino acids 261-320, amino acids 332-392, amino acids 395-445, or amino acids 515-625 of SEQ ID NO: 187, amino acids 19-637, amino acids 37-269, amino acids 270-329, amino acids 341-396, amino acids 404-454, amino acids 525-635 of SEQ ID NO: 188, amino acids 19-630, amino acids 28-260, amino acids 261-320, amino acids 332-385, amino acids 394-445, amino acids 395-446, amino acids 517-626 of SEQ ID NO: 190, amino acids 19-778, amino acids 128-410, amino acids 412-470, amino acids 481-537, amino acids 545-595, amino acids 666-776 of SEQ ID NO: 191; amino acids 17-489, amino acids 211-265, amino acids 274-323, amino acids 360-475 of SEQ ID NO: 192 and SEQ ID NO: 193, amino acids 17-452, amino acids 172-216, amino acids 234-276, or amino acids 313-438 of SEQ ID NO: 194, amino acids 17-456, amino acids 172-216, amino acids 234-276, or amino acids 313-442 of SEQ ID NO: 195; amino acids 29-539, amino acids 29-510, amino acids 71-295, amino acids 297-341, or amino acids 420-467 of SEQ ID NO: 196, amino acids 29-480, amino acids 71-295, or amino acids 297-341 of SEQ ID NO: 197, amino acids 29-438, amino acids 71-295, or amino acids 297-341 of SEQ ID NO: 198, amino acids 76-123 of SEQ ID NO: 199, amino acids 20-55 of SEQ ID NO: 200, amino acids 118-153 of SEQ ID NO: 205, amino acids 41-77 of SEQ ID NO: 206, amino acids 62-97 of SEQ ID NO: 207, amino acids 19-510, amino acids 71-295, amino acids 276-341, or amino acids 420-455 of SEQ ID NO: 208, amino acids 19-483, amino acids 71-295, amino acids 297-341, or amino acids 364-411 of SEQ ID NO: 209, amino acids 19-438, amino acids 71-295, amino acids 297-341, or amino acids 364-411 of SEQ ID NO: 210, amino acids 19-480, amino acids 71-295, amino acids 297-341, or amino acids 364-411 of SEQ ID NO: 211, amino acids 19-460, amino acids 71-295, amino acids 297-341, or amino acids 364-411 of SEQ ID NO: 212, amino acids 19-364, amino acids 71-295, or amino acids 297-341 of SEQ ID NO: 213; amino acids 18-530, amino acids 18-507, amino acids 60-285, or amino acids 408-446 of SEQ ID NO: 214, SEQ ID NO: 215, or SEQ ID NO: 216.

[0155] In still other aspects of this embodiment, a netrin targeting domain comprises a polypeptide having, e.g., at least 1, 2, 3, 4, 5, 6, 7, 8, 9, 10, 15 or 20 contiguous amino acid deletions, additions, and/or substitutions relative to amino acids 26-604; 46-283, amino acids 285-328, amino acids 341-390, amino acids 403-451, or amino acids 487-601 of SEQ ID NO: 173, SEQ ID NO: 174, SEQ ID NO: 177, amino acids 26-603, amino acids 45-282, amino acids 284-327, amino acids 340-389, or amino acids 486-600 of SEQ ID NO: 175, amino acids 25-600, amino acids 46-283, amino acids 285-328, amino acids 403-451, or amino acids 487-598 of SEQ ID NO: 176, amino acids 26-605, amino acids 46-283, amino acids 285-328, amino acids 341-390, amino acids 403-451, or amino acids 487-601 of SEQ ID NO: 178, amino acids 26-606, amino acids 47-285, amino acids 287-330, amino acids 343-392, amino acids 405-453, or amino acids 489-603 of SEQ ID NO: 179; amino acids 34-253, amino acids 254-299, amino acids 373-422, or amino acids 456-562 of SEQ ID NO: 180, amino acids 15-581, amino acids 33-306, amino acids 262-305, amino acids 318-387, amino acids 380-428, or amino acids 464-563 of SEQ ID NO: 181; amino acids 28-580, amino acids 34-253, amino acids 254-299, amino acids 373-422, or amino acids 456-562 of SEQ ID NO: 182, SEQ ID NO: 183, SEQ ID NO: 184, or SEQ ID NO: 185; amino acids 19-628, amino acids 29-260, amino acids 262-321, amino acids 332-385, amino acids 395-445, or amino acids 516-626 of SEQ ID NO: 186 or SEQ ID NO: 189, amino acids 19-627, amino acids 29-260, amino acids 261-320, amino acids 332-392, amino acids 395-445, or amino acids 515-625 of SEQ ID NO: 187, amino acids 19-637, amino acids 37-269, amino acids 270-329, amino acids 341-396, amino acids 404-454, amino acids 525-635 of SEQ ID NO: 188, amino acids 19-630, amino acids 28-260, amino acids 261-320, amino acids 332-385, amino acids 394-445, amino acids 395-446, amino acids 517-626 of SEQ ID NO: 190, amino acids 19-778, amino acids 128-410, amino acids 412-470, amino acids 481-537, amino acids 545-595, amino acids 666-776 of SEQ ID NO: 191; amino acids 17-489, amino acids 211-265, amino acids 274-323, amino acids 360-475 of SEQ ID NO: 192 and SEQ ID NO: 193, amino acids 17-452, amino acids 172-216, amino acids 234-276, or amino acids 313-438 of SEQ ID NO: 194, amino acids 17-456, amino acids 172-216, amino acids 234-276, or amino acids 313-442 of SEQ ID NO: 195; amino acids 29-539, amino acids 29-510, amino acids 71-295, amino acids 297-341, or amino acids 420-467 of SEQ ID NO: 196, amino acids 29-480, amino acids 71-295, or amino acids 297-341 of SEQ ID NO: 197, amino acids 29-438, amino acids 71-295, or amino acids 297-341 of SEQ ID NO: 198, amino acids 76-123 of SEQ ID NO: 199, amino acids 20-55 of SEQ ID NO: 200, amino acids 118-153 of SEQ ID NO: 205, amino acids 41-77 of SEQ ID NO: 206, amino acids 62-97 of SEQ ID NO: 207, amino acids 19-510, amino acids 71-295, amino acids 276-341, or amino acids 420-455 of SEQ ID NO: 208, amino acids 19-483, amino acids 71-295, amino acids 297-341, or amino acids 364-411 of SEQ ID NO: 209, amino acids 19-438, amino acids 71-295, amino acids 297-341, or amino acids 364-411 of SEQ ID NO: 210, amino acids 19-480, amino acids 71-295, amino acids 297-341, or amino acids 364-411 of SEQ ID NO: 211, amino acids 19-460, amino acids 71-295, amino acids 297-341, or amino acids 364-411 of SEQ ID NO: 212, amino acids 19-364, amino acids 71-295, or amino acids 297-341 of SEQ ID NO: 213; amino acids 18-530, amino acids 18-507, amino acids 60-285, or amino acids 408-446 of SEQ ID NO: 214, SEQ ID NO: 215, or SEQ ID NO: 216; or at most 1, 2, 3, 4, 5, 6, 7, 8, 9, 10, 15 or 20 contiguous amino acid deletions, additions, and/or substitutions relative to amino acids 26-604; 46-283, amino acids 285-328, amino acids 341-390, amino acids 403-451, or amino acids 487-601 of SEQ ID NO: 173, SEQ ID NO: 174, SEQ ID NO: 177, amino acids 26-603, amino acids 45-282, amino acids 284-327, amino acids 340-389, or amino acids 486-600 of SEQ ID NO: 175, amino acids 25-600, amino acids 46-283, amino acids 285-328, amino acids 403-451, or amino acids 487-598 of SEQ ID NO: 176, amino acids 26-605, amino acids 46-283, amino acids 285-328, amino acids 341-390, amino acids 403-451, or amino acids 487-601 of SEQ ID NO: 178, amino acids 26-606, amino acids 47-285, amino acids 287-330, amino acids 343-392, amino acids 405-453, or amino acids 489-603 of SEQ ID NO: 179; amino acids 34-253, amino acids 254-299, amino acids 373-422, or amino acids 456-562 of SEQ ID NO: 180, amino acids 15-581, amino acids 33-306, amino acids 262-305, amino acids 318-387, amino acids 380-428, or amino acids 464-563 of SEQ ID NO: 181; amino acids 28-580, amino acids 34-253, amino acids 254-299, amino acids 373-422, or amino acids 456-562 of SEQ ID NO: 182, SEQ ID NO: 183, SEQ ID NO: 184, or SEQ ID NO: 185; amino acids 19-628, amino acids 29-260, amino acids 262-321, amino acids 332-385, amino acids 395-445, or amino acids 516-626 of SEQ ID NO: 186 or SEQ ID NO: 189, amino acids 19-627, amino acids 29-260, amino acids 261-320, amino acids 332-392, amino acids 395-445, or amino acids 515-625 of SEQ ID NO: 187, amino acids 19-637, amino acids 37-269, amino acids 270-329, amino acids 341-396, amino acids 404-454, amino acids 525-635 of SEQ ID NO: 188, amino acids 19-630, amino acids 28-260, amino acids 261-320, amino acids 332-385, amino acids 394-445, amino acids 395-446, amino acids 517-626 of SEQ ID NO: 190, amino acids 19-778, amino acids 128-410, amino acids 412-470, amino acids 481-537, amino acids 545-595, amino acids 666-776 of SEQ ID NO: 191; amino acids 17-489, amino acids 211-265, amino acids 274-323, amino acids 360-475 of SEQ ID NO: 192 and SEQ ID NO: 193, amino acids 17-452, amino acids 172-216, amino acids 234-276, or amino acids 313-438 of SEQ ID NO: 194, amino acids 17-456, amino acids 172-216, amino acids 234-276, or amino acids 313-442 of SEQ ID NO: 195; amino acids 29-539, amino acids 29-510, amino acids 71-295, amino acids 297-341, or amino acids 420-467 of SEQ ID NO: 196, amino acids 29-480, amino acids 71-295, or amino acids 297-341 of SEQ ID NO: 197, amino acids 29-438, amino acids 71-295, or amino acids 297-341 of SEQ ID NO: 198, amino acids 76-123 of SEQ ID NO: 199, amino acids 20-55 of SEQ ID NO: 200, amino acids 118-153 of SEQ ID NO: 205, amino acids 41-77 of SEQ ID NO: 206, amino acids 62-97 of SEQ ID NO: 207, amino acids 19-510, amino acids 71-295, amino acids 276-341, or amino acids 420-455 of SEQ ID NO: 208, amino acids 19-483, amino acids 71-295, amino acids 297-341, or amino acids 364-411 of SEQ ID NO: 209, amino acids 19-438, amino acids 71-295, amino acids 297-341, or amino acids 364-411 of SEQ ID NO: 210, amino acids 19-480, amino acids 71-295, amino acids 297-341, or amino acids 364-411 of SEQ ID NO: 211, amino acids 19-460, amino acids 71-295, amino acids 297-341, or amino acids 364-411 of SEQ ID NO: 212, amino acids 19-364, amino acids 71-295, or amino acids 297-341 of SEQ ID NO: 213; amino acids 18-530, amino acids 18-507, amino acids 60-285, or amino acids 408-446 of SEQ ID NO: 214, SEQ ID NO: 215, or SEQ ID NO: 216.

[0156] An example of a targeting domain disclosed herein is a Delta-like (DII) targeting domain or a jagged targeting domain. Non-limiting examples of a DII targeting domain include a Delta-like-1 targeting domain, a Delta-like-2 targeting domain, and a Delta-like-3 targeting domain. Non-limiting examples of a jagged targeting domain include a jagged-1 targeting domain and a jagged-2 targeting domain. DII and jagged targeting domains bind to transmembrane receptors present on the surface of endothelial cells associated with aberrant new blood vessel formation. For example, DII and jagged receptors like Notch-1, Notch-2, Notch-3 and Notch-4 are expressed in endothelial cells undergoing angiogenesis in response to tumor progression. As such, a TVEMP comprising a DII targeting domain or a jagged targeting domain would be effective in treating a disease or disorder associated with aberrant new blood vessel formation.

[0157] Thus, in an embodiment, a targeting domain comprises a DII targeting domain or a jagged targeting domain. In aspects of this embodiment a DII targeting domain is a Delta-like-1 targeting domain, a Delta-like-2 targeting domain, and a Delta-like-3 targeting domain. In other aspects of this embodiment a jagged targeting domain is a jagged-1 targeting domain and a jagged-2 targeting domain. In aspects of this embodiment, a targeting domain comprises a DII targeting domain including SEQ ID NO: 219, SEQ ID NO: 220, SEQ ID NO: 221, SEQ ID NO: 222, SEQ ID NO: 223, SEQ ID NO: 224, SEQ ID NO: 225, SEQ ID NO: 226, SEQ ID NO: 227, SEQ ID NO: 228, or SEQ ID NO: 229; a jagged targeting domain including SEQ ID NO: 230, SEQ ID NO: 231, SEQ ID NO: 232, SEQ ID NO: 233, SEQ ID NO: 234, SEQ ID NO: 235, SEQ ID NO: 236, or SEQ ID NO: 237. In yet other aspects of this embodiment, a targeting domain comprises a DII targeting domain including amino acids 159-221 of SEQ ID NO: 219 or SEQ ID NO: 220, amino acids 158-220 of SEQ ID NO: 221 or SEQ ID NO: 222, amino acids 47-618, amino acids 47-587, or amino acids 33-585 of SEQ ID NO: 223, SEQ ID NO: 224, SEQ ID NO: 225, or SEQ ID NO: 226, amino acids 27-685 or amino acids 155-217 of SEQ ID NO: 228, amino acids 27-686 or amino acids 156-218 of SEQ ID NO: 229; or a jagged targeting domain including amino acids 34-1218 or amino acids 167-229 of SEQ ID NO: 230, SEQ ID NO: 231, SEQ ID NO: 232, or SEQ ID NO: 233, 27-1200 or amino acids 178-240 of SEQ ID NO: 234, SEQ ID NO: 235, or SEQ ID NO: 237, or amino acids 37-99 or SEQ ID NO: 236.

[0158] In other aspects of this embodiment, a DII targeting domain or a jagged targeting domain comprises a polypeptide having an amino acid identity of, e.g., at least 70%, at least 75%, at least 80%, at least 85%, at least 90% or at least 95% to SEQ ID NO: 219, SEQ ID NO: 220, SEQ ID NO: 221, SEQ ID NO: 222, SEQ ID NO: 223, SEQ ID NO: 224, SEQ ID NO: 225, SEQ ID NO: 226, SEQ ID NO: 227, SEQ ID NO: 228, SEQ ID NO: 229, SEQ ID NO: 230, SEQ ID NO: 231, SEQ ID NO: 232, SEQ ID NO: 233, SEQ ID NO: 234, SEQ ID NO: 235, SEQ ID NO: 236, or SEQ ID NO: 237; or at most 70%, at most 75%, at most 80%, at most 85%, at most 90% or at most 95% to SEQ ID NO: 219, SEQ ID NO: 220, SEQ ID NO: 221, SEQ ID NO: 222, SEQ ID NO: 223, SEQ ID NO: 224, SEQ ID NO: 225, SEQ ID NO: 226, SEQ ID NO: 227, SEQ ID NO: 228, SEQ ID NO: 229, SEQ ID NO: 230, SEQ ID NO: 231, SEQ ID NO: 232, SEQ ID NO: 233, SEQ ID NO: 234, SEQ ID NO: 235, SEQ ID NO: 236, or SEQ ID NO: 237. In yet other aspects of this embodiment, a DII targeting domain or a jagged targeting domain comprises a polypeptide having, e.g., at least 1, 2, 3, 4, 5, 6, 7, 8, 9, 10, 15 or 20 non-contiguous amino acid deletions, additions, and/or substitutions relative to SEQ ID NO: 219, SEQ ID NO: 220, SEQ ID NO: 221, SEQ ID NO: 222, SEQ ID NO: 223, SEQ ID NO: 224, SEQ ID NO: 225, SEQ ID NO: 226, SEQ ID NO: 227, SEQ ID NO: 228, SEQ ID NO: 229, SEQ ID NO: 230, SEQ ID NO: 231, SEQ ID NO: 232, SEQ ID NO: 233, SEQ ID NO: 234, SEQ ID NO: 235, SEQ ID NO: 236, or SEQ ID NO: 237; or at most 1, 2, 3, 4, 5, 6, 7, 8, 9, 10, 15 or 20 non-contiguous amino acid deletions, additions, and/or substitutions relative to SEQ ID NO: 219, SEQ ID NO: 220, SEQ ID NO: 221, SEQ ID NO: 222, SEQ ID NO: 223, SEQ ID NO: 224, SEQ ID NO: 225, SEQ ID NO: 226, SEQ ID NO: 227, SEQ ID NO: 228, SEQ ID NO: 229, SEQ ID NO: 230, SEQ ID NO: 231, SEQ ID NO: 232, SEQ ID NO: 233, SEQ ID NO: 234, SEQ ID NO: 235, SEQ ID NO: 236, or SEQ ID NO: 237. In still other aspects of this embodiment a DII targeting domain or a jagged targeting domain comprises a polypeptide having, e.g., at least 1, 2, 3, 4, 5, 6, 7, 8, 9, 10, 15 or 20 contiguous amino acid deletions, additions, and/or substitutions relative to SEQ ID NO: 219, SEQ ID NO: 220, SEQ ID NO: 221, SEQ ID NO: 222, SEQ ID NO: 223, SEQ ID NO: 224, SEQ ID NO: 225, SEQ ID NO: 226, SEQ ID NO: 227, SEQ ID NO: 228, SEQ ID NO: 229, SEQ ID NO: 230, SEQ ID NO: 231, SEQ ID NO: 232, SEQ ID NO: 233, SEQ ID NO: 234, SEQ ID NO: 235, SEQ ID NO: 236, or SEQ ID NO: 237; or at most 1, 2, 3, 4, 5, 6, 7, 8, 9, 10, 15 or 20 contiguous amino acid deletions, additions, and/or substitutions relative to SEQ ID NO: 219, SEQ ID NO: 220, SEQ ID NO: 221, SEQ ID NO: 222, SEQ ID NO: 223, SEQ ID NO: 224, SEQ ID NO: 225, SEQ ID NO: 226, SEQ ID NO: 227, SEQ ID NO: 228, SEQ ID NO: 229, SEQ ID NO: 230, SEQ ID NO: 231, SEQ ID NO: 232, SEQ ID NO: 233, SEQ ID NO: 234, SEQ ID NO: 235, SEQ ID NO: 236, or SEQ ID NO: 237.

[0159] In other aspects of this embodiment, a DII targeting domain or a jagged targeting domain comprises a polypeptide having an amino acid identity of, e.g., at least 70%, at least 75%, at least 80%, at least 85%, at least 90% or at least 95% to amino acids 159-221 of SEQ ID NO: 219 or SEQ ID NO: 220, amino acids 158-220 of SEQ ID NO: 221 or SEQ ID NO: 222, amino acids 47-618, amino acids 47-587, or amino acids 33-585 of SEQ ID NO: 223, SEQ ID NO: 224, SEQ ID NO: 225, or SEQ ID NO: 226, amino acids 27-685 or amino acids 155-217 of SEQ ID NO: 228, amino acids 27-686 or amino acids 156-218 of SEQ ID NO: 229; amino acids 34-1218 or amino acids 167-229 of SEQ ID NO: 230, SEQ ID NO: 231, SEQ ID NO: 232, or SEQ ID NO: 233, 27-1200 or amino acids 178-240 of SEQ ID NO: 234, SEQ ID NO: 235, or SEQ ID NO: 237, or amino acids 37-99 or SEQ ID NO: 236; or at most 70%, at most 75%, at most 80%, at most 85%, at most 90% or at most 95% to amino acids 159-221 of SEQ ID NO: 219 or SEQ ID NO: 220, amino acids 158-220 of SEQ ID NO: 221 or SEQ ID NO: 222, amino acids 47-618, amino acids 47-587, or amino acids 33-585 of SEQ ID NO: 223, SEQ ID NO: 224, SEQ ID NO: 225, or SEQ ID NO: 226, amino acids 27-685 or amino acids 155-217 of SEQ ID NO: 228, amino acids 27-686 or amino acids 156-218 of SEQ ID NO: 229; amino acids 34-1218 or amino acids 167-229 of SEQ ID NO: 230, SEQ ID NO: 231, SEQ ID NO: 232, or SEQ ID NO: 233, 27-1200 or amino acids 178-240 of SEQ ID NO: 234, SEQ ID NO: 235, or SEQ ID NO: 237, or amino acids 37-99 or SEQ ID NO: 236. In yet other aspects of this embodiment, a DII targeting domain or a jagged targeting domain comprises a polypeptide having, e.g., at least 1, 2, 3, 4, 5, 6, 7, 8, 9, 10, 15 or 20 non-contiguous amino acid deletions, additions, and/or substitutions relative to amino acids 159-221 of SEQ ID NO: 219 or SEQ ID NO: 220, amino acids 158-220 of SEQ ID NO: 221 or SEQ ID NO: 222, amino acids 47-618, amino acids 47-587, or amino acids 33-585 of SEQ ID NO: 223, SEQ ID NO: 224, SEQ ID NO: 225, or SEQ ID NO: 226, amino acids 27-685 or amino acids 155-217 of SEQ ID NO: 228, amino acids 27-686 or amino acids 156-218 of SEQ ID NO: 229; amino acids 34-1218 or amino acids 167-229 of SEQ ID NO: 230, SEQ ID NO: 231, SEQ ID NO: 232, or SEQ ID NO: 233, 27-1200 or amino acids 178-240 of SEQ ID NO: 234, SEQ ID NO: 235, or SEQ ID NO: 237, or amino acids 37-99 or SEQ ID NO: 236; or at most 1, 2, 3, 4, 5, 6, 7, 8, 9, 10, 15 or 20 non-contiguous amino acid deletions, additions, and/or substitutions relative to amino acids 159-221 of SEQ ID NO: 219 or SEQ ID NO: 220, amino acids 158-220 of SEQ ID NO: 221 or SEQ ID NO: 222, amino acids 47-618, amino acids 47-587, or amino acids 33-585 of SEQ ID NO: 223, SEQ ID NO: 224, SEQ ID NO: 225, or SEQ ID NO: 226, amino acids 27-685 or amino acids 155-217 of SEQ ID NO: 228, amino acids 27-686 or amino acids 156-218 of SEQ ID NO: 229; amino acids 34-1218 or amino acids 167-229 of SEQ ID NO: 230, SEQ ID NO: 231, SEQ ID NO: 232, or SEQ ID NO: 233, 27-1200 or amino acids 178-240 of SEQ ID NO: 234, SEQ ID NO: 235, or SEQ ID NO: 237, or amino acids 37-99 or SEQ ID NO: 236. In still other aspects of this embodiment, a DII targeting domain or a jagged targeting domain comprises a polypeptide having, e.g., at least 1, 2, 3, 4, 5, 6, 7, 8, 9, 10, 15 or 20 contiguous amino acid deletions, additions, and/or substitutions relative to amino acids 159-221 of SEQ ID NO: 219 or SEQ ID NO: 220, amino acids 158-220 of SEQ ID NO: 221 or SEQ ID NO: 222, amino acids 47-618, amino acids 47-587, or amino acids 33-585 of SEQ ID NO: 223, SEQ ID NO: 224, SEQ ID NO: 225, or SEQ ID NO: 226, amino acids 27-685 or amino acids 155-217 of SEQ ID NO: 228, amino acids 27-686 or amino acids 156-218 of SEQ ID NO: 229; amino acids 34-1218 or amino acids 167-229 of SEQ ID NO: 230, SEQ ID NO: 231, SEQ ID NO: 232, or SEQ ID NO: 233, 27-1200 or amino acids 178-240 of SEQ ID NO: 234, SEQ ID NO: 235, or SEQ ID NO: 237, or amino acids 37-99 or SEQ ID NO: 236; or at most 1, 2, 3, 4, 5, 6, 7, 8, 9, 10, 15 or 20 contiguous amino acid deletions, additions, and/or substitutions relative to amino acids 159-221 of SEQ ID NO: 219 or SEQ ID NO: 220, amino acids 158-220 of SEQ ID NO: 221 or SEQ ID NO: 222, amino acids 47-618, amino acids 47-587, or amino acids 33-585 of SEQ ID NO: 223, SEQ ID NO: 224, SEQ ID NO: 225, or SEQ ID NO: 226, amino acids 27-685 or amino acids 155-217 of SEQ ID NO: 228, amino acids 27-686 or amino acids 156-218 of SEQ ID NO: 229; amino acids 34-1218 or amino acids 167-229 of SEQ ID NO: 230, SEQ ID NO: 231, SEQ ID NO: 232, or SEQ ID NO: 233, 27-1200 or amino acids 178-240 of SEQ ID NO: 234, SEQ ID NO: 235, or SEQ ID NO: 237, or amino acids 37-99 or SEQ ID NO: 236.

[0160] An example of a targeting domain disclosed herein is a semaphorin (Sema) targeting domain. Non-limiting examples of a Sema targeting domain include a semaphoring-3A targeting domain, a semaphoring-3F targeting domain, a semaphoring-4D targeting domain, and a semaphoring-5A targeting domain. Sema targeting domains bind to transmembrane receptors present on the surface of endothelial cells associated with aberrant new blood vessel formation. For example, Sema receptors like neurophillin-1, neurophin-2, plexin-A1, plexin-A2, plexin-B and plexin-B3 are expressed in endothelial cells undergoing angiogenesis in response to tumor progression. As such, a TVEMP comprising a Sema targeting domain would be effective in treating a disease or disorder associated with aberrant new blood vessel formation.

[0161] Thus, in an embodiment, a targeting domain comprises a Sema targeting domain. In aspects of this embodiment, a Sema targeting domain comprises a semaphoring-3A targeting domain, a semaphoring-3F targeting domain, a semaphoring-4D targeting domain, and a semaphoring-5A targeting domain. In other aspects of this embodiment, a Sema targeting domain comprises SEQ ID NO: 238, SEQ ID NO: 239, SEQ ID NO: 240, SEQ ID NO: 241, SEQ ID NO: 242, SEQ ID NO: 243, SEQ ID NO: 244, SEQ ID NO: 245, or SEQ ID NO: 246. In yet other aspects of this embodiment, a Sema targeting domain comprises amino acids 22-771, amino acids 57-498, amino acids 517-552, or amino acids 581-670 of SEQ ID NO: 238, SEQ ID NO: 239, amino acids 19-785, amino acids 57-529, amino acids 548-584, or amino acids 609-697 of SEQ ID NO: 240, amino acids, 57-498, amino acids 517-553, amino acids 517-553, or amino acids 578-666 of SEQ ID NO: 241, amino acids 22-862, amino acids 50-482, amino acids 503-554, or amino acids 559-637 of SEQ ID NO: 242, amino acids 22-738, amino acids 50-482, amino acids 503-549, or amino acids 600-679 of SEQ ID NO: 243, amino acids 24-861, amino acids 50-482, amino acids 503-550, amino acids 559-646 of SEQ ID NO: 244, amino acids, 23-1074, amino acids 58-468 or amino acids 486-533 of SEQ ID NO: 245, SEQ ID NO: 246.

[0162] In other aspects of this embodiment, a Sema targeting domain comprises a polypeptide having an amino acid identity of, e.g., at least 70%, at least 75%, at least 80%, at least 85%, at least 90% or at least 95% to SEQ ID NO: 238, SEQ ID NO: 239, SEQ ID NO: 240, SEQ ID NO: 241, SEQ ID NO: 242, SEQ ID NO: 243, SEQ ID NO: 244, SEQ ID NO: 245, or SEQ ID NO: 246; or at most 70%, at most 75%, at most 80%, at most 85%, at most 90% or at most 95% to SEQ ID NO: 238, SEQ ID NO: 239, SEQ ID NO: 240, SEQ ID NO: 241, SEQ ID NO: 242, SEQ ID NO: 243, SEQ ID NO: 244, SEQ ID NO: 245, or SEQ ID NO: 246. In yet other aspects of this embodiment, a Sema targeting domain comprises a polypeptide having, e.g., at least 1, 2, 3, 4, 5, 6, 7, 8, 9, 10, 15 or 20 non-contiguous amino acid deletions, additions, and/or substitutions relative to SEQ ID NO: 238, SEQ ID NO: 239, SEQ ID NO: 240, SEQ ID NO: 241, SEQ ID NO: 242, SEQ ID NO: 243, SEQ ID NO: 244, SEQ ID NO: 245, or SEQ ID NO: 246; or at most 1, 2, 3, 4, 5, 6, 7, 8, 9, 10, 15 or 20 non-contiguous amino acid deletions, additions, and/or substitutions relative to SEQ ID NO: 238, SEQ ID NO: 239, SEQ ID NO: 240, SEQ ID NO: 241, SEQ ID NO: 242, SEQ ID NO: 243, SEQ ID NO: 244, SEQ ID NO: 245, or SEQ ID NO: 246. In still other aspects of this embodiment, a Sema targeting domain comprises a polypeptide having, e.g., at least 1, 2, 3, 4, 5, 6, 7, 8, 9, 10, 15 or 20 contiguous amino acid deletions, additions, and/or substitutions relative to SEQ ID NO: 238, SEQ ID NO: 239, SEQ ID NO: 240, SEQ ID NO: 241, SEQ ID NO: 242, SEQ ID NO: 243, SEQ ID NO: 244, SEQ ID NO: 245, or SEQ ID NO: 246; or at most 1, 2, 3, 4, 5, 6, 7, 8, 9, 10, 15 or 20 contiguous amino acid deletions, additions, and/or substitutions relative to SEQ ID NO: 238, SEQ ID NO: 239, SEQ ID NO: 240, SEQ ID NO: 241, SEQ ID NO: 242, SEQ ID NO: 243, SEQ ID NO: 244, SEQ ID NO: 245, or SEQ ID NO: 246.

[0163] In other aspects of this embodiment, a Sema targeting domain comprises a polypeptide having an amino acid identity of, e.g., at least 70%, at least 75%, at least 80%, at least 85%, at least 90% or at least 95% to amino acids 22-771, amino acids 57-498, amino acids 517-552, or amino acids 581-670 of SEQ ID NO: 238, SEQ ID NO: 239, amino acids 19-785, amino acids 57-529, amino acids 548-584, or amino acids 609-697 of SEQ ID NO: 240, amino acids, 57-498, amino acids 517-553, amino acids 517-553, or amino acids 578-666 of SEQ ID NO: 241, amino acids 22-862, amino acids 50-482, amino acids 503-554, or amino acids 559-637 of SEQ ID NO: 242, amino acids 22-738, amino acids 50-482, amino acids 503-549, or amino acids 600-679 of SEQ ID NO: 243, amino acids 24-861, amino acids 50-482, amino acids 503-550, amino acids 559-646 of SEQ ID NO: 244, amino acids, 23-1074, amino acids 58-468 or amino acids 486-533 of SEQ ID NO: 245, SEQ ID NO: 246; or at most 70%, at most 75%, at most 80%, at most 85%, at most 90% or at most 95% to amino acids 22-771, amino acids 57-498, amino acids 517-552, or amino acids 581-670 of SEQ ID NO: 238, SEQ ID NO: 239, amino acids 19-785, amino acids 57-529, amino acids 548-584, or amino acids 609-697 of SEQ ID NO: 240, amino acids, 57-498, amino acids 517-553, amino acids 517-553, or amino acids 578-666 of SEQ ID NO: 241, amino acids 22-862, amino acids 50-482, amino acids 503-554, or amino acids 559-637 of SEQ ID NO: 242, amino acids 22-738, amino acids 50-482, amino acids 503-549, or amino acids 600-679 of SEQ ID NO: 243, amino acids 24-861, amino acids 50-482, amino acids 503-550, amino acids 559-646 of SEQ ID NO: 244, amino acids, 23-1074, amino acids 58-468 or amino acids 486-533 of SEQ ID NO: 245, SEQ ID NO: 246. In yet other aspects of this embodiment, a Sema targeting domain comprises a polypeptide having, e.g., at least 1, 2, 3, 4, 5, 6, 7, 8, 9, 10, 15 or 20 non-contiguous amino acid deletions, additions, and/or substitutions relative to amino acids 22-771, amino acids 57-498, amino acids 517-552, or amino acids 581-670 of SEQ ID NO: 238, SEQ ID NO: 239, amino acids 19-785, amino acids 57-529, amino acids 548-584, or amino acids 609-697 of SEQ ID NO: 240, amino acids, 57-498, amino acids 517-553, amino acids 517-553, or amino acids 578-666 of SEQ ID NO: 241, amino acids 22-862, amino acids 50-482, amino acids 503-554, or amino acids 559-637 of SEQ ID NO: 242, amino acids 22-738, amino acids 50-482, amino acids 503-549, or amino acids 600-679 of SEQ ID NO: 243, amino acids 24-861, amino acids 50-482, amino acids 503-550, amino acids 559-646 of SEQ ID NO: 244, amino acids, 23-1074, amino acids 58-468 or amino acids 486-533 of SEQ ID NO: 245, SEQ ID NO: 246; or at most 1, 2, 3, 4, 5, 6, 7, 8, 9, 10, 15 or 20 non-contiguous amino acid deletions, additions, and/or substitutions relative to amino acids 22-771, amino acids 57-498, amino acids 517-552, or amino acids 581-670 of SEQ ID NO: 238, SEQ ID NO: 239, amino acids 19-785, amino acids 57-529, amino acids 548-584, or amino acids 609-697 of SEQ ID NO: 240, amino acids, 57-498, amino acids 517-553, amino acids 517-553, or amino acids 578-666 of SEQ ID NO: 241, amino acids 22-862, amino acids 50-482, amino acids 503-554, or amino acids 559-637 of SEQ ID NO: 242, amino acids 22-738, amino acids 50-482, amino acids 503-549, or amino acids 600-679 of SEQ ID NO: 243, amino acids 24-861, amino acids 50-482, amino acids 503-550, amino acids 559-646 of SEQ ID NO: 244, amino acids, 23-1074, amino acids 58-468 or amino acids 486-533 of SEQ ID NO: 245, SEQ ID NO: 246. In still other aspects of this embodiment, a Sema targeting domain comprises a polypeptide having, e.g., at least 1, 2, 3, 4, 5, 6, 7, 8, 9, 10, 15 or 20 contiguous amino acid deletions, additions, and/or substitutions relative to amino acids 22-771, amino acids 57-498, amino acids 517-552, or amino acids 581-670 of SEQ ID NO: 238, SEQ ID NO: 239, amino acids 19-785, amino acids 57-529, amino acids 548-584, or amino acids 609-697 of SEQ ID NO: 240, amino acids, 57-498, amino acids 517-553, amino acids 517-553, or amino acids 578-666 of SEQ ID NO: 241, amino acids 22-862, amino acids 50-482, amino acids 503-554, or amino acids 559-637 of SEQ ID NO: 242, amino acids 22-738, amino acids 50-482, amino acids 503-549, or amino acids 600-679 of SEQ ID NO: 243, amino acids 24-861, amino acids 50-482, amino acids 503-550, amino acids 559-646 of SEQ ID NO: 244, amino acids, 23-1074, amino acids 58-468 or amino acids 486-533 of SEQ ID NO: 245, SEQ ID NO: 246; or at most 1, 2, 3, 4, 5, 6, 7, 8, 9, 10, 15 or 20 contiguous amino acid deletions, additions, and/or substitutions relative to amino acids 22-771, amino acids 57-498, amino acids 517-552, or amino acids 581-670 of SEQ ID NO: 238, SEQ ID NO: 239, amino acids 19-785, amino acids 57-529, amino acids 548-584, or amino acids 609-697 of SEQ ID NO: 240, amino acids, 57-498, amino acids 517-553, amino acids 517-553, or amino acids 578-666 of SEQ ID NO: 241, amino acids 22-862, amino acids 50-482, amino acids 503-554, or amino acids 559-637 of SEQ ID NO: 242, amino acids 22-738, amino acids 50-482, amino acids 503-549, or amino acids 600-679 of SEQ ID NO: 243, amino acids 24-861, amino acids 50-482, amino acids 503-550, amino acids 559-646 of SEQ ID NO: 244, amino acids, 23-1074, amino acids 58-468 or amino acids 486-533 of SEQ ID NO: 245, SEQ ID NO: 246.

[0164] An example of a targeting domain disclosed herein is a thrombospondin targeting domain or a brain-specific angiogenesis inhibitor (BSAI) targeting domain. Non-limiting examples of a thrombospondin targeting domain include a thrombospondin-1 targeting domain and a thrombospondin-2 targeting domain. Non-limiting examples of a BSAI targeting domain include a BSAI-1 targeting domain and a BSAI-2 targeting domain. Thrombospondin and BSAI targeting domains bind to transmembrane receptors present on the surface of endothelial cells associated with aberrant new blood vessel formation. For example, thrombospondin and BSAI receptors like CD36 are expressed in endothelial cells undergoing angiogenesis in response to tumor progression. As such, a TVEMP comprising a thrombospondin targeting domain or a BSAI targeting domain would be effective in treating a disease or disorder associated with aberrant new blood vessel formation.

[0165] Thus, in an embodiment, a targeting domain comprises a thrombospondin targeting domain or a BSAI targeting domain. In aspects of this embodiment, a thrombospondin targeting domain is a thrombospondin-1 targeting domain or a thrombospondin-2 targeting domain. In other aspects of this embodiment, a BSAI targeting domain is a vaculostatin targeting domain. In aspects of this embodiment, a targeting domain comprises a thrombospondin targeting domain including SEQ ID NO: 247, SEQ ID NO: 248, SEQ ID NO: 249, or SEQ ID NO: 250; or a BSAI targeting domain including SEQ ID NO: 217 or SEQ ID NO: 218. In yet other aspects of this embodiment, a targeting domain comprises a thrombospondin targeting domain including amino acids 19-1170 of SEQ ID NO: 247, SEQ ID NO: 248, SEQ ID NO: 249, or SEQ ID NO: 250; or a BSAI targeting domain including amino acids 31-1584, amino acids 31-930, amino acids 359-520, amino acids 412-575, amino acids 264-314, amino acids 359-407, amino acids 412-462, amino acids 486-520, amino acids 525-575, amino acids 577-643, amino acids 653-875, or amino acids 880-938 of SEQ ID NO: 217, amino acids 21-1549, amino acids 21-920, amino acids 305-519, amino acids 413-586, amino acids 305-353, amino acids 413-463, amino acids 469-519, amino acids 522-586, or amino acids 597-857 of SEQ ID NO: 218.

[0166] In other aspects of this embodiment, a thrombospondin targeting domain or a BSAI targeting domain comprises a polypeptide having an amino acid identity of, e.g., at least 70%, at least 75%, at least 80%, at least 85%, at least 90% or at least 95% to SEQ ID NO: 247, SEQ ID NO: 248, SEQ ID NO: 249, SEQ ID NO: 250, SEQ ID NO: 217 or SEQ ID NO: 218; or at most 70%, at most 75%, at most 80%, at most 85%, at most 90% or at most 95% to SEQ ID NO: 247, SEQ ID NO: 248, SEQ ID NO: 249, SEQ ID NO: 250, SEQ ID NO: 217 or SEQ ID NO: 218. In yet other aspects of this embodiment, a thrombospondin targeting domain or a BSAI targeting domain comprises a polypeptide having, e.g., at least 1, 2, 3, 4, 5, 6, 7, 8, 9, 10, 15 or 20 non-contiguous amino acid deletions, additions, and/or substitutions relative to SEQ ID NO: 247, SEQ ID NO: 248, SEQ ID NO: 249, SEQ ID NO: 250, SEQ ID NO: 217 or SEQ ID NO: 218; or at most 1, 2, 3, 4, 5, 6, 7, 8, 9, 10, 15 or 20 non-contiguous amino acid deletions, additions, and/or substitutions relative to SEQ ID NO: 247, SEQ ID NO: 248, SEQ ID NO: 249, SEQ ID NO: 250, SEQ ID NO: 217 or SEQ ID NO: 218. In still other aspects of this embodiment a thrombospondin targeting domain or a BSAI targeting domain comprises a polypeptide having, e.g., at least 1, 2, 3, 4, 5, 6, 7, 8, 9, 10, 15 or 20 contiguous amino acid deletions, additions, and/or substitutions relative to SEQ ID NO: 247, SEQ ID NO: 248, SEQ ID NO: 249, SEQ ID NO: 250, SEQ ID NO: 217 or SEQ ID NO: 218; or at most 1, 2, 3, 4, 5, 6, 7, 8, 9, 10, 15 or 20 contiguous amino acid deletions, additions, and/or substitutions relative to SEQ ID NO: 247, SEQ ID NO: 248, SEQ ID NO: 249, SEQ ID NO: 250, SEQ ID NO: 217 or SEQ ID NO: 218.

[0167] In other aspects of this embodiment, a thrombospondin targeting domain or a BSAI targeting domain comprises a polypeptide having an amino acid identity of, e.g., at least 70%, at least 75%, at least 80%, at least 85%, at least 90% or at least 95% to amino acids 19-1170 of SEQ ID NO: 247, SEQ ID NO: 248, SEQ ID NO: 249, SEQ ID NO: 250, amino acids 31-1584, amino acids 31-930, amino acids 359-520, amino acids 412-575, amino acids 264-314, amino acids 359-407, amino acids 412-462, amino acids 486-520, amino acids 525-575, amino acids 577-643, amino acids 653-875, or amino acids 880-938 of SEQ ID NO: 217, amino acids 21-1549, amino acids 21-920, amino acids 305-519, amino acids 413-586, amino acids 305-353, amino acids 413-463, amino acids 469-519, amino acids 522-586, or amino acids 597-857 of SEQ ID NO: 218; or at most 70%, at most 75%, at most 80%, at most 85%, at most 90% or at most 95% to amino acids 19-1170 of SEQ ID NO: 247, SEQ ID NO: 248, SEQ ID NO: 249, SEQ ID NO: 250, amino acids 31-1584, amino acids 31-930, amino acids 359-520, amino acids 412-575, amino acids 264-314, amino acids 359-407, amino acids 412-462, amino acids 486-520, amino acids 525-575, amino acids 577-643, amino acids 653-875, or amino acids 880-938 of SEQ ID NO: 217, amino acids 21-1549, amino acids 21-920, amino acids 305-519, amino acids 413-586, amino acids 305-353, amino acids 413-463, amino acids 469-519, amino acids 522-586, or amino acids 597-857 of SEQ ID NO: 218. In yet other aspects of this embodiment, a thrombospondin targeting domain or a BSAI targeting domain comprises a polypeptide having, e.g., at least 1, 2, 3, 4, 5, 6, 7, 8, 9, 10, 15 or 20 non-contiguous amino acid deletions, additions, and/or substitutions relative to amino acids 19-1170 of SEQ ID NO: 247, SEQ ID NO: 248, SEQ ID NO: 249, SEQ ID NO: 250, amino acids 31-1584, amino acids 31-930, amino acids 359-520, amino acids 412-575, amino acids 264-314, amino acids 359-407, amino acids 412-462, amino acids 486-520, amino acids 525-575, amino acids 577-643, amino acids 653-875, or amino acids 880-938 of SEQ ID NO: 217, amino acids 21-1549, amino acids 21-920, amino acids 305-519, amino acids 413-586, amino acids 305-353, amino acids 413-463, amino acids 469-519, amino acids 522-586, or amino acids 597-857 of SEQ ID NO: 218; or at most 1, 2, 3, 4, 5, 6, 7, 8, 9, 10, 15 or 20 non-contiguous amino acid deletions, additions, and/or substitutions relative to amino acids 19-1170 of SEQ ID NO: 247, SEQ ID NO: 248, SEQ ID NO: 249, SEQ ID NO: 250, amino acids 31-1584, amino acids 31-930, amino acids 359-520, amino acids 412-575, amino acids 264-314, amino acids 359-407, amino acids 412-462, amino acids 486-520, amino acids 525-575, amino acids 577-643, amino acids 653-875, or amino acids 880-938 of SEQ ID NO: 217, amino acids 21-1549, amino acids 21-920, amino acids 305-519, amino acids 413-586, amino acids 305-353, amino acids 413-463, amino acids 469-519, amino acids 522-586, or amino acids 597-857 of SEQ ID NO: 218. In still other aspects of this embodiment, a thrombospondin targeting domain or a BSAI targeting domain comprises a polypeptide having, e.g., at least 1, 2, 3, 4, 5, 6, 7, 8, 9, 10, 15 or 20 contiguous amino acid deletions, additions, and/or substitutions relative to amino acids 19-1170 of SEQ ID NO: 247, SEQ ID NO: 248, SEQ ID NO: 249, SEQ ID NO: 250, amino acids 31-1584, amino acids 31-930, amino acids 359-520, amino acids 412-575, amino acids 264-314, amino acids 359-407, amino acids 412-462, amino acids 486-520, amino acids 525-575, amino acids 577-643, amino acids 653-875, or amino acids 880-938 of SEQ ID NO: 217, amino acids 21-1549, amino acids 21-920, amino acids 305-519, amino acids 413-586, amino acids 305-353, amino acids 413-463, amino acids 469-519, amino acids 522-586, or amino acids 597-857 of SEQ ID NO: 218; or at most 1, 2, 3, 4, 5, 6, 7, 8, 9, 10, 15 or 20 contiguous amino acid deletions, additions, and/or substitutions relative to amino acids 19-1170 of SEQ ID NO: 247, SEQ ID NO: 248, SEQ ID NO: 249, SEQ ID NO: 250, amino acids 31-1584, amino acids 31-930, amino acids 359-520, amino acids 412-575, amino acids 264-314, amino acids 359-407, amino acids 412-462, amino acids 486-520, amino acids 525-575, amino acids 577-643, amino acids 653-875, or amino acids 880-938 of SEQ ID NO: 217, amino acids 21-1549, amino acids 21-920, amino acids 305-519, amino acids 413-586, amino acids 305-353, amino acids 413-463, amino acids 469-519, amino acids 522-586, or amino acids 597-857 of SEQ ID NO: 218.

[0168] An example of a targeting domain disclosed herein is a chondromodulin targeting domain or a 16 kDa prolactin fragment targeting domain. Chondromodulin and 16 kDa prolactin fragment targeting domains bind to transmembrane receptors present on the surface of endothelial cells associated with aberrant new blood vessel formation. For example, chondromodulin receptors are expressed in endothelial cells undergoing angiogenesis in response to tumor progression. As another example, 16 kDa prolactin fragment receptors are expressed in endothelial cells undergoing angiogenesis in response to tumor progression, as well as endothelial cells participating in angiogenesis and neovasculogenesis associated with several disorders including ocular disorders. As such, a TVEMP comprising a chondromodulin targeting domain or a 16 kDa prolactin fragment targeting domain would be effective in treating a disease or disorder associated with aberrant new blood vessel formation.

[0169] Thus, in an embodiment, a targeting domain comprises a chondromodulin targeting domain or a 16 kDa prolactin fragment targeting domain. In aspects of this embodiment, a targeting domain comprises a chondromodulin targeting domain including SEQ ID NO: 251, SEQ ID NO: 252, or SEQ ID NO: 253; or a 16 kDa prolactin fragment targeting domain including SEQ ID NO: 254. In yet other aspects of this embodiment, a targeting domain comprises a chondromodulin targeting domain including amino acids 214-334 of SEQ ID NO: 251 or SEQ ID NO: 253, or amino acids 215-335 of SEQ ID NO: 252.

[0170] In other aspects of this embodiment, a chondromodulin targeting domain or a 16 kDa prolactin fragment targeting domain comprises a polypeptide having an amino acid identity of, e.g., at least 70%, at least 75%, at least 80%, at least 85%, at least 90% or at least 95% to SEQ ID NO: 251, SEQ ID NO: 252, SEQ ID NO: 253, or SEQ ID NO: 254; or at most 70%, at most 75%, at most 80%, at most 85%, at most 90% or at most 95% to SEQ ID NO: 251, SEQ ID NO: 252, SEQ ID NO: 253, or SEQ ID NO: 254. In yet other aspects of this embodiment, a chondromodulin targeting domain or a 16 kDa prolactin fragment targeting domain comprises a polypeptide having, e.g., at least 1, 2, 3, 4, 5, 6, 7, 8, 9, 10, 15 or 20 non-contiguous amino acid deletions, additions, and/or substitutions relative to SEQ ID NO: 251, SEQ ID NO: 252, SEQ ID NO: 253, or SEQ ID NO: 254; or at most 1, 2, 3, 4, 5, 6, 7, 8, 9, 10, 15 or 20 non-contiguous amino acid deletions, additions, and/or substitutions relative to SEQ ID NO: 251, SEQ ID NO: 252, SEQ ID NO: 253, or SEQ ID NO: 254. In still other aspects of this embodiment a chondromodulin targeting domain or a 16 kDa prolactin fragment targeting domain comprises a polypeptide having, e.g., at least 1, 2, 3, 4, 5, 6, 7, 8, 9, 10, 15 or 20 contiguous amino acid deletions, additions, and/or substitutions relative to SEQ ID NO: 251, SEQ ID NO: 252, SEQ ID NO: 253, or SEQ ID NO: 254; or at most 1, 2, 3, 4, 5, 6, 7, 8, 9, 10, 15 or 20 contiguous amino acid deletions, additions, and/or substitutions relative to SEQ ID NO: 251, SEQ ID NO: 252, SEQ ID NO: 253, or SEQ ID NO: 254.

[0171] In other aspects of this embodiment, a chondromodulin targeting domain comprises a polypeptide having an amino acid identity of, e.g., at least 70%, at least 75%, at least 80%, at least 85%, at least 90% or at least 95% to amino acids 214-334 of SEQ ID NO: 251 or SEQ ID NO: 253, or amino acids 215-335 of SEQ ID NO: 252; or at most 70%, at most 75%, at most 80%, at most 85%, at most 90% or at most 95% to amino acids 214-334 of SEQ ID NO: 251 or SEQ ID NO: 253, or amino acids 215-335 of SEQ ID NO: 252. In yet other aspects of this embodiment, a chondromodulin targeting domain comprises a polypeptide having, e.g., at least 1, 2, 3, 4, 5, 6, 7, 8, 9, 10, 15 or 20 non-contiguous amino acid deletions, additions, and/or substitutions relative to amino acids 214-334 of SEQ ID NO: 251 or SEQ ID NO: 253, or amino acids 215-335 of SEQ ID NO: 252; or at most 1, 2, 3, 4, 5, 6, 7, 8, 9, 10, 15 or 20 non-contiguous amino acid deletions, additions, and/or substitutions relative to amino acids 214-334 of SEQ ID NO: 251 or SEQ ID NO: 253, or amino acids 215-335 of SEQ ID NO: 252. In still other aspects of this embodiment, a chondromodulin targeting domain comprises a polypeptide having, e.g., at least 1, 2, 3, 4, 5, 6, 7, 8, 9, 10, 15 or 20 contiguous amino acid deletions, additions, and/or substitutions relative to amino acids 214-334 of SEQ ID NO: 251 or SEQ ID NO: 253, or amino acids 215-335 of SEQ ID NO: 252; or at most 1, 2, 3, 4, 5, 6, 7, 8, 9, 10, 15 or 20 contiguous amino acid deletions, additions, and/or substitutions relative to amino acids 214-334 of SEQ ID NO: 251 or SEQ ID NO: 253, or amino acids 215-335 of SEQ ID NO: 252.

[0172] An example of a targeting domain disclosed herein is a granulocyte macrophage-colony stimulating factor (GM-CSF) targeting domain. GM-CSF targeting domains bind to transmembrane receptors present on the surface of endothelial cells associated with aberrant new blood vessel formation. For example, GM-CSF receptors are expressed in endothelial cells undergoing angiogenesis in response to tumor progression. As such, a TVEMP comprising a GM-CSF targeting domain would be effective in treating a disease or disorder associated with aberrant new blood vessel formation.

[0173] Thus, in an embodiment, a targeting domain comprises a GM-CSF targeting domain. In aspects of this embodiment, a GM-CSF targeting domain comprises SEQ ID NO: 255, SEQ ID NO: 256, SEQ ID NO: 257, SEQ ID NO: 258, SEQ ID NO: 259, SEQ ID NO: 260, or SEQ ID NO: 261. In yet other aspects of this embodiment, a GM-CSF targeting domain comprises amino acids 18-144, amino acids 18-138, or amino acids 27-138 of SEQ ID NO: 255, SEQ ID NO: 256, SEQ ID NO: 258, SEQ ID NO: 260, or SEQ ID NO: 261, amino acids 18-143, amino acids 18-137, or amino acids 30-137 of SEQ ID NO: 257, amino acids 18-141, amino acids 18-135, or amino acids 31-135 of SEQ ID NO: 259.

[0174] In other aspects of this embodiment, a GM-CSF targeting domain comprises a polypeptide having an amino acid identity of, e.g., at least 70%, at least 75%, at least 80%, at least 85%, at least 90% or at least 95% to SEQ ID NO: 255, SEQ ID NO: 256, SEQ ID NO: 257, SEQ ID NO: 258, SEQ ID NO: 259, SEQ ID NO: 260, or SEQ ID NO: 261; or at most 70%, at most 75%, at most 80%, at most 85%, at most 90% or at most 95% to SEQ ID NO: 255, SEQ ID NO: 256, SEQ ID NO: 257, SEQ ID NO: 258, SEQ ID NO: 259, SEQ ID NO: 260, or SEQ ID NO: 261. In yet other aspects of this embodiment, a GM-CSF targeting domain comprises a polypeptide having, e.g., at least 1, 2, 3, 4, 5, 6, 7, 8, 9, 10, 15 or 20 non-contiguous amino acid deletions, additions, and/or substitutions relative to SEQ ID NO: 255, SEQ ID NO: 256, SEQ ID NO: 257, SEQ ID NO: 258, SEQ ID NO: 259, SEQ ID NO: 260, or SEQ ID NO: 261; or at most 1, 2, 3, 4, 5, 6, 7, 8, 9, 10, 15 or 20 non-contiguous amino acid deletions, additions, and/or substitutions relative to SEQ ID NO: 255, SEQ ID NO: 256, SEQ ID NO: 257, SEQ ID NO: 258, SEQ ID NO: 259, SEQ ID NO: 260, or SEQ ID NO: 261. In still other aspects of this embodiment, a GM-CSF targeting domain comprises a polypeptide having, e.g., at least 1, 2, 3, 4, 5, 6, 7, 8, 9, 10, 15 or 20 contiguous amino acid deletions, additions, and/or substitutions relative to SEQ ID NO: 255, SEQ ID NO: 256, SEQ ID NO: 257, SEQ ID NO: 258, SEQ ID NO: 259, SEQ ID NO: 260, or SEQ ID NO: 261; or at most 1, 2, 3, 4, 5, 6, 7, 8, 9, 10, 15 or 20 contiguous amino acid deletions, additions, and/or substitutions relative to SEQ ID NO: 255, SEQ ID NO: 256, SEQ ID NO: 257, SEQ ID NO: 258, SEQ ID NO: 259, SEQ ID NO: 260, or SEQ ID NO: 261.

[0175] In other aspects of this embodiment, a GM-CSF targeting domain comprises a polypeptide having an amino acid identity of, e.g., at least 70%, at least 75%, at least 80%, at least 85%, at least 90% or at least 95% to amino acids 18-144, amino acids 18-138, or amino acids 27-138 of SEQ ID NO: 255, SEQ ID NO: 256, SEQ ID NO: 258, SEQ ID NO: 260, or SEQ ID NO: 261, amino acids 18-143, amino acids 18-137, or amino acids 30-137 of SEQ ID NO: 257, amino acids 18-141, amino acids 18-135, or amino acids 31-135 of SEQ ID NO: 259; or at most 70%, at most 75%, at most 80%, at most 85%, at most 90% or at most 95% to amino acids 18-144, amino acids 18-138, or amino acids 27-138 of SEQ ID NO: 255, SEQ ID NO: 256, SEQ ID NO: 258, SEQ ID NO: 260, or SEQ ID NO: 261, amino acids 18-143, amino acids 18-137, or amino acids 30-137 of SEQ ID NO: 257, amino acids 18-141, amino acids 18-135, or amino acids 31-135 of SEQ ID NO: 259. In yet other aspects of this embodiment, a GM-CSF targeting domain comprises a polypeptide having, e.g., at least 1, 2, 3, 4, 5, 6, 7, 8, 9, 10, 15 or 20 non-contiguous amino acid deletions, additions, and/or substitutions relative to amino acids 18-144, amino acids 18-138, or amino acids 27-138 of SEQ ID NO: 255, SEQ ID NO: 256, SEQ ID NO: 258, SEQ ID NO: 260, or SEQ ID NO: 261, amino acids 18-143, amino acids 18-137, or amino acids 30-137 of SEQ ID NO: 257, amino acids 18-141, amino acids 18-135, or amino acids 31-135 of SEQ ID NO: 259; or at most 1, 2, 3, 4, 5, 6, 7, 8, 9, 10, 15 or 20 non-contiguous amino acid deletions, additions, and/or substitutions relative to amino acids 18-144, amino acids 18-138, or amino acids 27-138 of SEQ ID NO: 255, SEQ ID NO: 256, SEQ ID NO: 258, SEQ ID NO: 260, or SEQ ID NO: 261, amino acids 18-143, amino acids 18-137, or amino acids 30-137 of SEQ ID NO: 257, amino acids 18-141, amino acids 18-135, or amino acids 31-135 of SEQ ID NO: 259. In still other aspects of this embodiment, a GM-CSF targeting domain comprises a polypeptide having, e.g., at least 1, 2, 3, 4, 5, 6, 7, 8, 9, 10, 15 or 20 contiguous amino acid deletions, additions, and/or substitutions relative to amino acids 18-144, amino acids 18-138, or amino acids 27-138 of SEQ ID NO: 255, SEQ ID NO: 256, SEQ ID NO: 258, SEQ ID NO: 260, or SEQ ID NO: 261, amino acids 18-143, amino acids 18-137, or amino acids 30-137 of SEQ ID NO: 257, amino acids 18-141, amino acids 18-135, or amino acids 31-135 of SEQ ID NO: 259; or at most 1, 2, 3, 4, 5, 6, 7, 8, 9, 10, 15 or 20 contiguous amino acid deletions, additions, and/or substitutions relative to amino acids 18-144, amino acids 18-138, or amino acids 27-138 of SEQ ID NO: 255, SEQ ID NO: 256, SEQ ID NO: 258, SEQ ID NO: 260, or SEQ ID NO: 261, amino acids 18-143, amino acids 18-137, or amino acids 30-137 of SEQ ID NO: 257, amino acids 18-141, amino acids 18-135, or amino acids 31-135 of SEQ ID NO: 259.

[0176] An example of a targeting domain disclosed herein is an Interferon-α (IFN-α) targeting domain. IFN-α targeting domains bind to transmembrane receptors present on the surface of endothelial cells associated with aberrant new blood vessel formation. For example, IFN-α receptors like IFNAR1 and IFNAR2 are expressed in endothelial cells undergoing angiogenesis in response to tumor progression. As such, a TVEMP comprising an IFN-α targeting domain would be effective in treating a disease or disorder associated with aberrant new blood vessel formation.

[0177] Thus, in an embodiment, a targeting domain comprises an IFN-α targeting domain. In aspects of this embodiment, an IFN-α targeting domain comprises SEQ ID NO: 262, SEQ ID NO: 263, SEQ ID NO: 264, SEQ ID NO: 265, SEQ ID NO: 266, SEQ ID NO: 267, SEQ ID NO: 268, SEQ ID NO: 269, or SEQ ID NO: 270. In yet other aspects of this embodiment, an IFN-α targeting domain comprises amino acids 24-189 or amino acids 26-178 of SEQ ID NO: 262, SEQ ID NO: 263, SEQ ID NO: 264, SEQ ID NO: 265, SEQ ID NO: 266, SEQ ID NO: 267, SEQ ID NO: 268, SEQ ID NO: 269, or SEQ ID NO: 270.

[0178] In other aspects of this embodiment, an IFN-α targeting domain comprises a polypeptide having an amino acid identity of, e.g., at least 70%, at least 75%, at least 80%, at least 85%, at least 90% or at least 95% to SEQ ID NO: 262, SEQ ID NO: 263, SEQ ID NO: 264, SEQ ID NO: 265, SEQ ID NO: 266, SEQ ID NO: 267, SEQ ID NO: 268, SEQ ID NO: 269, or SEQ ID NO: 270; or at most 70%, at most 75%, at most 80%, at most 85%, at most 90% or at most 95% to SEQ ID NO: 262, SEQ ID NO: 263, SEQ ID NO: 264, SEQ ID NO: 265, SEQ ID NO: 266, SEQ ID NO: 267, SEQ ID NO: 268, SEQ ID NO: 269, or SEQ ID NO: 270. In yet other aspects of this embodiment, an IFN-α targeting domain comprises a polypeptide having, e.g., at least 1, 2, 3, 4, 5, 6, 7, 8, 9, 10, 15 or 20 non-contiguous amino acid deletions, additions, and/or substitutions relative to SEQ ID NO: 262, SEQ ID NO: 263, SEQ ID NO: 264, SEQ ID NO: 265, SEQ ID NO: 266, SEQ ID NO: 267, SEQ ID NO: 268, SEQ ID NO: 269, or SEQ ID NO: 270; or at most 1, 2, 3, 4, 5, 6, 7, 8, 9, 10, 15 or 20 non-contiguous amino acid deletions, additions, and/or substitutions relative to SEQ ID NO: 262, SEQ ID NO: 263, SEQ ID NO: 264, SEQ ID NO: 265, SEQ ID NO: 266, SEQ ID NO: 267, SEQ ID NO: 268, SEQ ID NO: 269, or SEQ ID NO: 270. In still other aspects of this embodiment, an IFN-α targeting domain comprises a polypeptide having, e.g., at least 1, 2, 3, 4, 5, 6, 7, 8, 9, 10, 15 or 20 contiguous amino acid deletions, additions, and/or substitutions relative to SEQ ID NO: 262, SEQ ID NO: 263, SEQ ID NO: 264, SEQ ID NO: 265, SEQ ID NO: 266, SEQ ID NO: 267, SEQ ID NO: 268, SEQ ID NO: 269, or SEQ ID NO: 270; or at most 1, 2, 3, 4, 5, 6, 7, 8, 9, 10, 15 or 20 contiguous amino acid deletions, additions, and/or substitutions relative to SEQ ID NO: 262, SEQ ID NO: 263, SEQ ID NO: 264, SEQ ID NO: 265, SEQ ID NO: 266, SEQ ID NO: 267, SEQ ID NO: 268, SEQ ID NO: 269, or SEQ ID NO: 270.

[0179] In other aspects of this embodiment, an IFN-α targeting domain comprises a polypeptide having an amino acid identity of, e.g., at least 70%, at least 75%, at least 80%, at least 85%, at least 90% or at least 95% to amino acids 24-189 or amino acids 26-178 of SEQ ID NO: 262, SEQ ID NO: 263, SEQ ID NO: 264, SEQ ID NO: 265, SEQ ID NO: 266, SEQ ID NO: 267, SEQ ID NO: 268, SEQ ID NO: 269, or SEQ ID NO: 270; or at most 70%, at most 75%, at most 80%, at most 85%, at most 90% or at most 95% to amino acids 24-189 or amino acids 26-178 of SEQ ID NO: 262, SEQ ID NO: 263, SEQ ID NO: 264, SEQ ID NO: 265, SEQ ID NO: 266, SEQ ID NO: 267, SEQ ID NO: 268, SEQ ID NO: 269, or SEQ ID NO: 270. In yet other aspects of this embodiment, an IFN-α targeting domain comprises a polypeptide having, e.g., at least 1, 2, 3, 4, 5, 6, 7, 8, 9, 10, 15 or 20 non-contiguous amino acid deletions, additions, and/or substitutions relative to amino acids 24-189 or amino acids 26-178 of SEQ ID NO: 262, SEQ ID NO: 263, SEQ ID NO: 264, SEQ ID NO: 265, SEQ ID NO: 266, SEQ ID NO: 267, SEQ ID NO: 268, SEQ ID NO: 269, or SEQ ID NO: 270; or at most 1, 2, 3, 4, 5, 6, 7, 8, 9, 10, 15 or 20 non-contiguous amino acid deletions, additions, and/or substitutions relative to amino acids 24-189 or amino acids 26-178 of SEQ ID NO: 262, SEQ ID NO: 263, SEQ ID NO: 264, SEQ ID NO: 265, SEQ ID NO: 266, SEQ ID NO: 267, SEQ ID NO: 268, SEQ ID NO: 269, or SEQ ID NO: 270. In still other aspects of this embodiment, an IFN-α targeting domain comprises a polypeptide having, e.g., at least 1, 2, 3, 4, 5, 6, 7, 8, 9, 10, 15 or 20 contiguous amino acid deletions, additions, and/or substitutions relative to amino acids 24-189 or amino acids 26-178 of SEQ ID NO: 262, SEQ ID NO: 263, SEQ ID NO: 264, SEQ ID NO: 265, SEQ ID NO: 266, SEQ ID NO: 267, SEQ ID NO: 268, SEQ ID NO: 269, or SEQ ID NO: 270; or at most 1, 2, 3, 4, 5, 6, 7, 8, 9, 10, 15 or 20 contiguous amino acid deletions, additions, and/or substitutions relative to amino acids 24-189 or amino acids 26-178 of SEQ ID NO: 262, SEQ ID NO: 263, SEQ ID NO: 264, SEQ ID NO: 265, SEQ ID NO: 266, SEQ ID NO: 267, SEQ ID NO: 268, SEQ ID NO: 269, or SEQ ID NO: 270.

[0180] An example of a targeting domain disclosed herein is a pigment epithelium-derived factor (PEDF) targeting domain. PEDF targeting domains bind to transmembrane receptors present on the surface of endothelial cells associated with aberrant new blood vessel formation. For example, PEDF receptors are expressed in endothelial cells undergoing angiogenesis in response to tumor progression as well as endothelial cells participating in angiogenesis and neovasculogenesis associated with several disorders including ocular disorders. As such, a TVEMP comprising a PEDF targeting domain would be effective in treating a disease or disorder associated with aberrant new blood vessel formation.

[0181] Thus, in an embodiment, a targeting domain comprises a PEDF targeting domain. In aspects of this embodiment, a PEDF targeting domain comprises SEQ ID NO: 271, SEQ ID NO: 272, or SEQ ID NO: 273. In yet other aspects of this embodiment, a PEDF targeting domain comprises amino acids 20-418 or amino acids 40-415 of SEQ ID NO: 271, amino acids 20-417 or amino acids 38-410 of SEQ ID NO: 272, or amino acids 20-417 or amino acids 39-414 of SEQ ID NO: 273.

[0182] In other aspects of this embodiment, a PEDF targeting domain comprises a polypeptide having an amino acid identity of, e.g., at least 70%, at least 75%, at least 80%, at least 85%, at least 90% or at least 95% to SEQ ID NO: 271, SEQ ID NO: 272, or SEQ ID NO: 273; or at most 70%, at most 75%, at most 80%, at most 85%, at most 90% or at most 95% to SEQ ID NO: 271, SEQ ID NO: 272, or SEQ ID NO: 273. In yet other aspects of this embodiment, a PEDF targeting domain comprises a polypeptide having, e.g., at least 1, 2, 3, 4, 5, 6, 7, 8, 9, 10, 15 or 20 non-contiguous amino acid deletions, additions, and/or substitutions relative to SEQ ID NO: 271, SEQ ID NO: 272, or SEQ ID NO: 273; or at most 1, 2, 3, 4, 5, 6, 7, 8, 9, 10, 15 or 20 non-contiguous amino acid deletions, additions, and/or substitutions relative to SEQ ID NO: 271, SEQ ID NO: 272, or SEQ ID NO: 273. In still other aspects of this embodiment, a PEDF targeting domain comprises a polypeptide having, e.g., at least 1, 2, 3, 4, 5, 6, 7, 8, 9, 10, 15 or 20 contiguous amino acid deletions, additions, and/or substitutions relative to SEQ ID NO: 271, SEQ ID NO: 272, or SEQ ID NO: 273; or at most 1, 2, 3, 4, 5, 6, 7, 8, 9, 10, 15 or 20 contiguous amino acid deletions, additions, and/or substitutions relative to SEQ ID NO: 271, SEQ ID NO: 272, or SEQ ID NO: 273.

[0183] In other aspects of this embodiment, a PEDF targeting domain comprises a polypeptide having an amino acid identity of, e.g., at least 70%, at least 75%, at least 80%, at least 85%, at least 90% or at least 95% to amino acids 20-418 or amino acids 40-415 of SEQ ID NO: 271, amino acids 20-417 or amino acids 38-410 of SEQ ID NO: 272, or amino acids 20-417 or amino acids 39-414 of SEQ ID NO: 273; or at most 70%, at most 75%, at most 80%, at most 85%, at most 90% or at most 95% to amino acids 20-418 or amino acids 40-415 of SEQ ID NO: 271, amino acids 20-417 or amino acids 38-410 of SEQ ID NO: 272, or amino acids 20-417 or amino acids 39-414 of SEQ ID NO: 273. In yet other aspects of this embodiment, a PEDF targeting domain comprises a polypeptide having, e.g., at least 1, 2, 3, 4, 5, 6, 7, 8, 9, 10, 15 or 20 non-contiguous amino acid deletions, additions, and/or substitutions relative to amino acids 20-418 or amino acids 40-415 of SEQ ID NO: 271, amino acids 20-417 or amino acids 38-410 of SEQ ID NO: 272, or amino acids 20-417 or amino acids 39-414 of SEQ ID NO: 273; or at most 1, 2, 3, 4, 5, 6, 7, 8, 9, 10, 15 or 20 non-contiguous amino acid deletions, additions, and/or substitutions relative to amino acids 20-418 or amino acids 40-415 of SEQ ID NO: 271, amino acids 20-417 or amino acids 38-410 of SEQ ID NO: 272, or amino acids 20-417 or amino acids 39-414 of SEQ ID NO: 273. In still other aspects of this embodiment, a PEDF targeting domain comprises a polypeptide having, e.g., at least 1, 2, 3, 4, 5, 6, 7, 8, 9, 10, 15 or 20 contiguous amino acid deletions, additions, and/or substitutions relative to amino acids 20-418 or amino acids 40-415 of SEQ ID NO: 271, amino acids 20-417 or amino acids 38-410 of SEQ ID NO: 272, or amino acids 20-417 or amino acids 39-414 of SEQ ID NO: 273; or at most 1, 2, 3, 4, 5, 6, 7, 8, 9, 10, 15 or 20 contiguous amino acid deletions, additions, and/or substitutions relative to amino acids 20-418 or amino acids 40-415 of SEQ ID NO: 271, amino acids 20-417 or amino acids 38-410 of SEQ ID NO: 272, or amino acids 20-417 or amino acids 39-414 of SEQ ID NO: 273.

[0184] An example of a targeting domain disclosed herein is a troponin targeting domain. Troponin targeting domains bind to transmembrane receptors present on the surface of endothelial cells associated with aberrant new blood vessel formation. For example, troponin receptors like FGFR2 are expressed in endothelial cells undergoing angiogenesis in response to tumor progression. As such, a TVEMP comprising a troponin targeting domain would be effective in treating a disease or disorder associated with aberrant new blood vessel formation.

[0185] Thus, in an embodiment, a targeting domain comprises a troponin targeting domain. In aspects of this embodiment, a troponin targeting domain comprises SEQ ID NO: 274, SEQ ID NO: 275, or SEQ ID NO: 276. In yet other aspects of this embodiment, a troponin targeting domain comprises amino acids 15-132 or amino acids 28-131 of SEQ ID NO: 274, SEQ ID NO: 275, or SEQ ID NO: 276.

[0186] In other aspects of this embodiment, a troponin targeting domain comprises a polypeptide having an amino acid identity of, e.g., at least 70%, at least 75%, at least 80%, at least 85%, at least 90% or at least 95% to SEQ ID NO: 274, SEQ ID NO: 275, or SEQ ID NO: 276; or at most 70%, at most 75%, at most 80%, at most 85%, at most 90% or at most 95% to SEQ ID NO: 274, SEQ ID NO: 275, or SEQ ID NO: 276. In yet other aspects of this embodiment, a troponin targeting domain comprises a polypeptide having, e.g., at least 1, 2, 3, 4, 5, 6, 7, 8, 9, 10, 15 or 20 non-contiguous amino acid deletions, additions, and/or substitutions relative to SEQ ID NO: 274, SEQ ID NO: 275, or SEQ ID NO: 276; or at most 1, 2, 3, 4, 5, 6, 7, 8, 9, 10, 15 or 20 non-contiguous amino acid deletions, additions, and/or substitutions relative to SEQ ID NO: 274, SEQ ID NO: 275, or SEQ ID NO: 276. In still other aspects of this embodiment, a troponin targeting domain comprises a polypeptide having, e.g., at least 1, 2, 3, 4, 5, 6, 7, 8, 9, 10, 15 or 20 contiguous amino acid deletions, additions, and/or substitutions relative to SEQ ID NO: 274, SEQ ID NO: 275, or SEQ ID NO: 276; or at most 1, 2, 3, 4, 5, 6, 7, 8, 9, 10, 15 or 20 contiguous amino acid deletions, additions, and/or substitutions relative to SEQ ID NO: 274, SEQ ID NO: 275, or SEQ ID NO: 276.

[0187] In other aspects of this embodiment, a troponin targeting domain comprises a polypeptide having an amino acid identity of, e.g., at least 70%, at least 75%, at least 80%, at least 85%, at least 90% or at least 95% to amino acids 15-132 or amino acids 28-131 of SEQ ID NO: 274, SEQ ID NO: 275, or SEQ ID NO: 276; or at most 70%, at most 75%, at most 80%, at most 85%, at most 90% or at most 95% to amino acids 15-132 or amino acids 28-131 of SEQ ID NO: 274, SEQ ID NO: 275, or SEQ ID NO: 276. In yet other aspects of this embodiment, a troponin targeting domain comprises a polypeptide having, e.g., at least 1, 2, 3, 4, 5, 6, 7, 8, 9, 10, 15 or 20 non-contiguous amino acid deletions, additions, and/or substitutions relative to amino acids 15-132 or amino acids 28-131 of SEQ ID NO: 274, SEQ ID NO: 275, or SEQ ID NO: 276; or at most 1, 2, 3, 4, 5, 6, 7, 8, 9, 10, 15 or 20 non-contiguous amino acid deletions, additions, and/or substitutions relative to amino acids 15-132 or amino acids 28-131 of SEQ ID NO: 274, SEQ ID NO: 275, or SEQ ID NO: 276. In still other aspects of this embodiment, a troponin targeting domain comprises a polypeptide having, e.g., at least 1, 2, 3, 4, 5, 6, 7, 8, 9, 10, 15 or 20 contiguous amino acid deletions, additions, and/or substitutions relative to amino acids 15-132 or amino acids 28-131 of SEQ ID NO: 274, SEQ ID NO: 275, or SEQ ID NO: 276; or at most 1, 2, 3, 4, 5, 6, 7, 8, 9, 10, 15 or 20 contiguous amino acid deletions, additions, and/or substitutions relative to amino acids 15-132 or amino acids 28-131 of SEQ ID NO: 274, SEQ ID NO: 275, or SEQ ID NO: 276.

[0188] An example of a targeting domain disclosed herein is a vasohibin (VASH) targeting domain or an Urocortin (Ucn) targeting domain. Non-limiting examples of a VASH targeting domain include a vasohibin-1 targeting domain and a vasohibin-2 targeting domain. Non-limiting examples of an urocortin targeting domain include a Urocortin-2 targeting domain. VASH and Ucn targeting domains bind to transmembrane receptors present on the surface of endothelial cells associated with aberrant new blood vessel formation. For example, VASH receptors are expressed in endothelial cells undergoing angiogenesis in response to tumor progression as well as endothelial cells participating in angiogenesis and neovasculogenesis associated with several disorders including ocular disorders. As another example, Ucn receptors are expressed in endothelial cells undergoing angiogenesis in response to tumor progression. As such, a TVEMP comprising a VASH targeting domain or an Ucn targeting domain would be effective in treating a disease or disorder associated with aberrant new blood vessel formation.

[0189] Thus, in an embodiment, a targeting domain comprises a VASH targeting domain or an Ucn targeting domain. In aspects of this embodiment, a VASH targeting domain is a VASH1 targeting domain or a VASH2 targeting domain. In aspects of this embodiment, a targeting domain comprises a VASH targeting domain including SEQ ID NO: 277, SEQ ID NO: 278, SEQ ID NO: 279, SEQ ID NO: 280, SEQ ID NO: 281, SEQ ID NO: 282, or SEQ ID NO: 283; or a Ucn targeting domain including SEQ ID NO: 284, SEQ ID NO: 285, or SEQ ID NO: 286. In yet other aspects of this embodiment, a targeting domain comprises a VASH targeting domain including amino acids 319-365 of SEQ ID NO: 277 or SEQ ID NO: 278, or amino acids 329-375 of SEQ ID NO: 279; or a Ucn targeting domain including amino acids 20-112 or amino acids 72-109 of SEQ ID NO: 284 or SEQ ID NO: 285, or amino acids 21-123 or amino acids 83-119 of SEQ ID NO: 286.

[0190] In other aspects of this embodiment, a VASH targeting domain or an Ucn targeting domain comprises a polypeptide having an amino acid identity of, e.g., at least 70%, at least 75%, at least 80%, at least 85%, at least 90% or at least 95% to SEQ ID NO: 277, SEQ ID NO: 278, SEQ ID NO: 279, SEQ ID NO: 280, SEQ ID NO: 281, SEQ ID NO: 282, SEQ ID NO: 283, SEQ ID NO: 284, SEQ ID NO: 285, or SEQ ID NO: 286; or at most 70%, at most 75%, at most 80%, at most 85%, at most 90% or at most 95% to SEQ ID NO: 277, SEQ ID NO: 278, SEQ ID NO: 279, SEQ ID NO: 280, SEQ ID NO: 281, SEQ ID NO: 282, SEQ ID NO: 283, SEQ ID NO: 284, SEQ ID NO: 285, or SEQ ID NO: 286. In yet other aspects of this embodiment, a VASH targeting domain or an Ucn targeting domain comprises a polypeptide having, e.g., at least 1, 2, 3, 4, 5, 6, 7, 8, 9, 10, 15 or 20 non-contiguous amino acid deletions, additions, and/or substitutions relative to SEQ ID NO: 277, SEQ ID NO: 278, SEQ ID NO: 279, SEQ ID NO: 280, SEQ ID NO: 281, SEQ ID NO: 282, SEQ ID NO: 283, SEQ ID NO: 284, SEQ ID NO: 285, or SEQ ID NO: 286; or at most 1, 2, 3, 4, 5, 6, 7, 8, 9, 10, 15 or 20 non-contiguous amino acid deletions, additions, and/or substitutions relative to SEQ ID NO: 277, SEQ ID NO: 278, SEQ ID NO: 279, SEQ ID NO: 280, SEQ ID NO: 281, SEQ ID NO: 282, SEQ ID NO: 283, SEQ ID NO: 284, SEQ ID NO: 285, or SEQ ID NO: 286. In still other aspects of this embodiment, a VASH targeting domain or an Ucn targeting domain comprises a polypeptide having, e.g., at least 1, 2, 3, 4, 5, 6, 7, 8, 9, 10, 15 or 20 contiguous amino acid deletions, additions, and/or substitutions relative to SEQ ID NO: 277, SEQ ID NO: 278, SEQ ID NO: 279, SEQ ID NO: 280, SEQ ID NO: 281, SEQ ID NO: 282, SEQ ID NO: 283, SEQ ID NO: 284, SEQ ID NO: 285, or SEQ ID NO: 286; or at most 1, 2, 3, 4, 5, 6, 7, 8, 9, 10, 15 or 20 contiguous amino acid deletions, additions, and/or substitutions relative to SEQ ID NO: 277, SEQ ID NO: 278, SEQ ID NO: 279, SEQ ID NO: 280, SEQ ID NO: 281, SEQ ID NO: 282, SEQ ID NO: 283, SEQ ID NO: 284, SEQ ID NO: 285, or SEQ ID NO: 286.

[0191] In other aspects of this embodiment, a VASH targeting domain or an Ucn targeting domain comprises a polypeptide having an amino acid identity of, e.g., at least 70%, at least 75%, at least 80%, at least 85%, at least 90% or at least 95% to amino acids 319-365 of SEQ ID NO: 277 or SEQ ID NO: 278, amino acids 329-375 of SEQ ID NO: 279, amino acids 20-112 or amino acids 72-109 of SEQ ID NO: 284 or SEQ ID NO: 285, or amino acids 21-123 or amino acids 83-119 of SEQ ID NO: 286; or at most 70%, at most 75%, at most 80%, at most 85%, at most 90% or at most 95% to amino acids 319-365 of SEQ ID NO: 277 or SEQ ID NO: 278, amino acids 329-375 of SEQ ID NO: 279, amino acids 20-112 or amino acids 72-109 of SEQ ID NO: 284 or SEQ ID NO: 285, or amino acids 21-123 or amino acids 83-119 of SEQ ID NO: 286. In yet other aspects of this embodiment, a VASH targeting domain or an Ucn targeting domain targeting domain comprises a polypeptide having, e.g., at least 1, 2, 3, 4, 5, 6, 7, 8, 9, 10, 15 or 20 non-contiguous amino acid deletions, additions, and/or substitutions relative to amino acids 319-365 of SEQ ID NO: 277 or SEQ ID NO: 278, amino acids 329-375 of SEQ ID NO: 279, amino acids 20-112 or amino acids 72-109 of SEQ ID NO: 284 or SEQ ID NO: 285, or amino acids 21-123 or amino acids 83-119 of SEQ ID NO: 286; or at most 1, 2, 3, 4, 5, 6, 7, 8, 9, 10, 15 or 20 non-contiguous amino acid deletions, additions, and/or substitutions relative to amino acids 319-365 of SEQ ID NO: 277 or SEQ ID NO: 278, amino acids 329-375 of SEQ ID NO: 279, amino acids 20-112 or amino acids 72-109 of SEQ ID NO: 284 or SEQ ID NO: 285, or amino acids 21-123 or amino acids 83-119 of SEQ ID NO: 286. In still other aspects of this embodiment, a VASH targeting domain or an Ucn targeting domain comprises a polypeptide having, e.g., at least 1, 2, 3, 4, 5, 6, 7, 8, 9, 10, 15 or 20 contiguous amino acid deletions, additions, and/or substitutions relative to amino acids 319-365 of SEQ ID NO: 277 or SEQ ID NO: 278, amino acids 329-375 of SEQ ID NO: 279, amino acids 20-112 or amino acids 72-109 of SEQ ID NO: 284 or SEQ ID NO: 285, or amino acids 21-123 or amino acids 83-119 of SEQ ID NO: 286; or at most 1, 2, 3, 4, 5, 6, 7, 8, 9, 10, 15 or 20 contiguous amino acid deletions, additions, and/or substitutions relative to amino acids 319-365 of SEQ ID NO: 277 or SEQ ID NO: 278, amino acids 329-375 of SEQ ID NO: 279, amino acids 20-112 or amino acids 72-109 of SEQ ID NO: 284 or SEQ ID NO: 285, or amino acids 21-123 or amino acids 83-119 of SEQ ID NO: 286.

[0192] An example of a targeting domain disclosed herein is a C-motif cytokine ligand (CL) targeting domain. Non-limiting examples of a C-motif cytokine ligand targeting domain is a lymphotactin targeting domain. C-motif cytokine ligand targeting domains bind to transmembrane receptors present on the surface of endothelial cells associated with aberrant new blood vessel formation. For example, lymphotactin receptors like XCR1 are expressed in endothelial cells undergoing angiogenesis in response to tumor progression as well as endothelial cells participating in angiogenesis and neovasculogenesis associated with several disorders including ocular disorders. As such, a TVEMP comprising a C-motif cytokine ligand targeting domain would be effective in treating a disease or disorder associated with aberrant new blood vessel formation.

[0193] Thus, in an embodiment, a targeting domain comprises a CL targeting domain. In aspects of this embodiment, a CL targeting domain is a lymphotactin targeting domain. In aspects of this embodiment, a CL targeting domain comprises SEQ ID NO: 287, SEQ ID NO: 288, SEQ ID NO: 289, SEQ ID NO: 290, SEQ ID NO: 291, SEQ ID NO: 292, or SEQ ID NO: 293. In yet other aspects of this embodiment, a CL targeting domain comprises amino acids 22-114, amino acids 22-93, or amino acids 30-93 of SEQ ID NO: 287, SEQ ID NO: 288, SEQ ID NO: 291, or SEQ ID NO: 292, amino acids 22-110, amino acids 22-88, or amino acids 26-83 of SEQ ID NO: 290, amino acids 22-97, amino acids 22-89, or amino acids 26-89 of SEQ ID NO: 293.

[0194] In other aspects of this embodiment, a CL targeting domain comprises a polypeptide having an amino acid identity of, e.g., at least 70%, at least 75%, at least 80%, at least 85%, at least 90% or at least 95% to SEQ ID NO: 287, SEQ ID NO: 288, SEQ ID NO: 289, SEQ ID NO: 290, SEQ ID NO: 291, SEQ ID NO: 292, or SEQ ID NO: 293; or at most 70%, at most 75%, at most 80%, at most 85%, at most 90% or at most 95% to SEQ ID NO: 287, SEQ ID NO: 288, SEQ ID NO: 289, SEQ ID NO: 290, SEQ ID NO: 291, SEQ ID NO: 292, or SEQ ID NO: 293. In yet other aspects of this embodiment, a CL targeting domain comprises a polypeptide having, e.g., at least 1, 2, 3, 4, 5, 6, 7, 8, 9, 10, 15 or 20 non-contiguous amino acid deletions, additions, and/or substitutions relative to SEQ ID NO: 287, SEQ ID NO: 288, SEQ ID NO: 289, SEQ ID NO: 290, SEQ ID NO: 291, SEQ ID NO: 292, or SEQ ID NO: 293; or at most 1, 2, 3, 4, 5, 6, 7, 8, 9, 10, 15 or 20 non-contiguous amino acid deletions, additions, and/or substitutions relative to SEQ ID NO: 287, SEQ ID NO: 288, SEQ ID NO: 289, SEQ ID NO: 290, SEQ ID NO: 291, SEQ ID NO: 292, or SEQ ID NO: 293. In still other aspects of this embodiment, a CL targeting domain comprises a polypeptide having, e.g., at least 1, 2, 3, 4, 5, 6, 7, 8, 9, 10, 15 or 20 contiguous amino acid deletions, additions, and/or substitutions relative to SEQ ID NO: 287, SEQ ID NO: 288, SEQ ID NO: 289, SEQ ID NO: 290, SEQ ID NO: 291, SEQ ID NO: 292, or SEQ ID NO: 293; or at most 1, 2, 3, 4, 5, 6, 7, 8, 9, 10, 15 or 20 contiguous amino acid deletions, additions, and/or substitutions relative to SEQ ID NO: 287, SEQ ID NO: 288, SEQ ID NO: 289, SEQ ID NO: 290, SEQ ID NO: 291, SEQ ID NO: 292, or SEQ ID NO: 293.

[0195] In other aspects of this embodiment, a CL targeting domain comprises a polypeptide having an amino acid identity of, e.g., at least 70%, at least 75%, at least 80%, at least 85%, at least 90% or at least 95% to amino acids 22-114, amino acids 22-93, or amino acids 30-93 of SEQ ID NO: 287, SEQ ID NO: 288, SEQ ID NO: 291, or SEQ ID NO: 292, amino acids 22-110, amino acids 22-88, or amino acids 26-83 of SEQ ID NO: 290, amino acids 22-97, amino acids 22-89, or amino acids 26-89 of SEQ ID NO: 293; or at most 70%, at most 75%, at most 80%, at most 85%, at most 90% or at most 95% to amino acids 22-114, amino acids 22-93, or amino acids 30-93 of SEQ ID NO: 287, SEQ ID NO: 288, SEQ ID NO: 291, or SEQ ID NO: 292, amino acids 22-110, amino acids 22-88, or amino acids 26-83 of SEQ ID NO: 290, amino acids 22-97, amino acids 22-89, or amino acids 26-89 of SEQ ID NO: 293. In yet other aspects of this embodiment, a CL targeting domain comprises a polypeptide having, e.g., at least 1, 2, 3, 4, 5, 6, 7, 8, 9, 10, 15 or 20 non-contiguous amino acid deletions, additions, and/or substitutions relative to amino acids 22-114, amino acids 22-93, or amino acids 30-93 of SEQ ID NO: 287, SEQ ID NO: 288, SEQ ID NO: 291, or SEQ ID NO: 292, amino acids 22-110, amino acids 22-88, or amino acids 26-83 of SEQ ID NO: 290, amino acids 22-97, amino acids 22-89, or amino acids 26-89 of SEQ ID NO: 293; or at most 1, 2, 3, 4, 5, 6, 7, 8, 9, 10, 15 or 20 non-contiguous amino acid deletions, additions, and/or substitutions relative to amino acids 22-114, amino acids 22-93, or amino acids 30-93 of SEQ ID NO: 287, SEQ ID NO: 288, SEQ ID NO: 291, or SEQ ID NO: 292, amino acids 22-110, amino acids 22-88, or amino acids 26-83 of SEQ ID NO: 290, amino acids 22-97, amino acids 22-89, or amino acids 26-89 of SEQ ID NO: 293. In still other aspects of this embodiment, a CL targeting domain comprises a polypeptide having, e.g., at least 1, 2, 3, 4, 5, 6, 7, 8, 9, 10, 15 or 20 contiguous amino acid deletions, additions, and/or substitutions relative to amino acids 22-114, amino acids 22-93, or amino acids 30-93 of SEQ ID NO: 287, SEQ ID NO: 288, SEQ ID NO: 291, or SEQ ID NO: 292, amino acids 22-110, amino acids 22-88, or amino acids 26-83 of SEQ ID NO: 290, amino acids 22-97, amino acids 22-89, or amino acids 26-89 of SEQ ID NO: 293; or at most 1, 2, 3, 4, 5, 6, 7, 8, 9, 10, 15 or 20 contiguous amino acid deletions, additions, and/or substitutions relative to amino acids 22-114, amino acids 22-93, or amino acids 30-93 of SEQ ID NO: 287, SEQ ID NO: 288, SEQ ID NO: 291, or SEQ ID NO: 292, amino acids 22-110, amino acids 22-88, or amino acids 26-83 of SEQ ID NO: 290, amino acids 22-97, amino acids 22-89, or amino acids 26-89 of SEQ ID NO: 293.

[0196] An example of a targeting domain disclosed herein is a C—C-motif cytokine ligand (CCL) targeting domain. Non-limiting examples of a C—C-motif cytokine ligand targeting domain is a CCL1 targeting domain and a CCL2 targeting domain. C—C-motif cytokine ligand targeting domains bind to transmembrane receptors present on the surface of endothelial cells associated with aberrant new blood vessel formation. For example, CCL1 receptors like CCR8 are expressed in endothelial cells participating in angiogenesis and neovasculogenesis associated with several disorders including ocular disorders. As another example, CCL2 receptors like CCR2 are expressed in endothelial cells undergoing angiogenesis in response to tumor progression. As such, a TVEMP comprising a C—C-motif cytokine ligand targeting domain would be effective in treating a disease or disorder associated with aberrant new blood vessel formation.

[0197] Thus, in an embodiment, a targeting domain comprises a CCL targeting domain. In aspects of this embodiment, a CCL targeting domain is a CCL1 targeting domain or a CCL2 targeting domain. In aspects of this embodiment, a CCL targeting domain comprises SEQ ID NO: 294, SEQ ID NO: 295, SEQ ID NO: 296, or SEQ ID NO: 297. In yet other aspects of this embodiment, a CCL targeting domain comprises amino acids 24-96, amino acids 33-89, or amino acids 34-62 SEQ ID NO: 294 or SEQ ID NO: 295, or amino acids 24-148, amino acids 34-91, or amino acids 24-85 SEQ ID NO: 296 or SEQ ID NO: 297.

[0198] In other aspects of this embodiment, a CCL targeting domain comprises a polypeptide having an amino acid identity of, e.g., at least 70%, at least 75%, at least 80%, at least 85%, at least 90% or at least 95% to SEQ ID NO: 294, SEQ ID NO: 295, SEQ ID NO: 296, or SEQ ID NO: 297; or at most 70%, at most 75%, at most 80%, at most 85%, at most 90% or at most 95% to SEQ ID NO: 294, SEQ ID NO: 295, SEQ ID NO: 296, or SEQ ID NO: 297. In yet other aspects of this embodiment, a CCL targeting domain comprises a polypeptide having, e.g., at least 1, 2, 3, 4, 5, 6, 7, 8, 9, 10, 15 or 20 non-contiguous amino acid deletions, additions, and/or substitutions relative to SEQ ID NO: 294, SEQ ID NO: 295, SEQ ID NO: 296, or SEQ ID NO: 297; or at most 1, 2, 3, 4, 5, 6, 7, 8, 9, 10, 15 or 20 non-contiguous amino acid deletions, additions, and/or substitutions relative to SEQ ID NO: 294, SEQ ID NO: 295, SEQ ID NO: 296, or SEQ ID NO: 297. In still other aspects of this embodiment, a CCL targeting domain comprises a polypeptide having, e.g., at least 1, 2, 3, 4, 5, 6, 7, 8, 9, 10, 15 or 20 contiguous amino acid deletions, additions, and/or substitutions relative to SEQ ID NO: 294, SEQ ID NO: 295, SEQ ID NO: 296, or SEQ ID NO: 297; or at most 1, 2, 3, 4, 5, 6, 7, 8, 9, 10, 15 or 20 contiguous amino acid deletions, additions, and/or substitutions relative to SEQ ID NO: 294, SEQ ID NO: 295, SEQ ID NO: 296, or SEQ ID NO: 297.

[0199] In other aspects of this embodiment, a CCL targeting domain comprises a polypeptide having an amino acid identity of, e.g., at least 70%, at least 75%, at least 80%, at least 85%, at least 90% or at least 95% to amino acids 24-96, amino acids 33-89, or amino acids 34-62 SEQ ID NO: 294 or SEQ ID NO: 295, or amino acids 24-148, amino acids 34-91, or amino acids 24-85 SEQ ID NO: 296 or SEQ ID NO: 297; or at most 70%, at most 75%, at most 80%, at most 85%, at most 90% or at most 95% to amino acids 24-96, amino acids 33-89, or amino acids 34-62 SEQ ID NO: 294 or SEQ ID NO: 295, or amino acids 24-148, amino acids 34-91, or amino acids 24-85 SEQ ID NO: 296 or SEQ ID NO: 297. In yet other aspects of this embodiment, a CCL targeting domain comprises a polypeptide having, e.g., at least 1, 2, 3, 4, 5, 6, 7, 8, 9, 10, 15 or 20 non-contiguous amino acid deletions, additions, and/or substitutions relative to amino acids 24-96, amino acids 33-89, or amino acids 34-62 SEQ ID NO: 294 or SEQ ID NO: 295, or amino acids 24-148, amino acids 34-91, or amino acids 24-85 SEQ ID NO: 296 or SEQ ID NO: 297; or at most 1, 2, 3, 4, 5, 6, 7, 8, 9, 10, 15 or 20 non-contiguous amino acid deletions, additions, and/or substitutions relative to amino acids 24-96, amino acids 33-89, or amino acids 34-62 SEQ ID NO: 294 or SEQ ID NO: 295, or amino acids 24-148, amino acids 34-91, or amino acids 24-85 SEQ ID NO: 296 or SEQ ID NO: 297. In still other aspects of this embodiment, a CCL targeting domain comprises a polypeptide having, e.g., at least 1, 2, 3, 4, 5, 6, 7, 8, 9, 10, 15 or 20 contiguous amino acid deletions, additions, and/or substitutions relative to amino acids 24-96, amino acids 33-89, or amino acids 34-62 SEQ ID NO: 294 or SEQ ID NO: 295, or amino acids 24-148, amino acids 34-91, or amino acids 24-85 SEQ ID NO: 296 or SEQ ID NO: 297; or at most 1, 2, 3, 4, 5, 6, 7, 8, 9, 10, 15 or 20 contiguous amino acid deletions, additions, and/or substitutions relative to amino acids 24-96, amino acids 33-89, or amino acids 34-62 SEQ ID NO: 294 or SEQ ID NO: 295, or amino acids 24-148, amino acids 34-91, or amino acids 24-85 SEQ ID NO: 296 or SEQ ID NO: 297.

[0200] An example of a targeting domain disclosed herein is a C—X—C-motif cytokine ligand (CXCL) targeting domain or an endothelial-monocyte activating polypeptide (EMAP) targeting domain. Non-limiting examples of a C—X—C-motif cytokine ligand targeting domain is a CXCL1 targeting domain, a CXCL2 targeting domain, a CXCL3 targeting domain, a CXCL4 targeting domain, a CXCL5 targeting domain, a CXCL6 targeting domain, a CXCL7 targeting domain, a CXCL8 targeting domain, a CXCL9 targeting domain, a CXCL10 targeting domain, a CXCL11 targeting domain, a CXCL12 targeting domain, a CXCL13 targeting domain, a CXCL14 targeting domain, a CXCL16 targeting domain, and an endothelial-monocyte activating polypeptide II (EMAP II) targeting domain. C—X—C-motif cytokine ligand targeting domains bind to transmembrane receptors present on the surface of endothelial cells associated with aberrant new blood vessel formation. For example, CXCL receptors like CXCR1, CXCR2, CXCR3A, CXCR3B, CXCR4, CXCR5, CXCR6 are expressed in endothelial cells undergoing angiogenesis in response to tumor progression as well as participating in angiogenesis and neovasculogenesis associated with several disorders including ocular disorders. As such, a TVEMP comprising a C—X—C-motif cytokine ligand targeting domain would be effective in treating a disease or disorder associated with aberrant new blood vessel formation.

[0201] Thus, in an embodiment, a targeting domain comprises a CXCL targeting domain. In aspects of this embodiment, a CXCL targeting domain is a CXCL1 targeting domain, a CXCL2 targeting domain, a CXCL3 targeting domain, a CXCL4 targeting domain, a CXCL5 targeting domain, a CXCL6 targeting domain, a CXCL7 targeting domain, a CXCL8 targeting domain, a CXCL9 targeting domain, a CXCL10 targeting domain, a CXCL11 targeting domain, a CXCL12 targeting domain, a CXCL13 targeting domain, a CXCL14 targeting domain, a CXCL16 targeting domain, or a EMAP targeting domain. In aspects of this embodiment, a CXCL targeting domain comprises SEQ ID NO: 298, SEQ ID NO: 299, SEQ ID NO: 300, SEQ ID NO: 301, SEQ ID NO: 302, SEQ ID NO: 303, SEQ ID NO: 304, SEQ ID NO: 305, SEQ ID NO: 306, SEQ ID NO: 307, SEQ ID NO: 308, SEQ ID NO: 309, SEQ ID NO: 310, SEQ ID NO: 311, SEQ ID NO: 312, SEQ ID NO: 313, SEQ ID NO: 314, SEQ ID NO: 315, SEQ ID NO: 316, SEQ ID NO: 317, SEQ ID NO: 318, SEQ ID NO: 319, SEQ ID NO: 320, SEQ ID NO: 321, SEQ ID NO: 322, SEQ ID NO: 323, SEQ ID NO: 324, SEQ ID NO: 325, SEQ ID NO: 326, SEQ ID NO: 327, SEQ ID NO: 328, SEQ ID NO: 329, SEQ ID NO: 330, SEQ ID NO: 331, SEQ ID NO: 332, SEQ ID NO: 333, SEQ ID NO: 334, SEQ ID NO: 335, SEQ ID NO: 336, SEQ ID NO: 337, SEQ ID NO: 338, SEQ ID NO: 339, SEQ ID NO: 340, SEQ ID NO: 341, SEQ ID NO: 342, SEQ ID NO: 343, SEQ ID NO: 344, SEQ ID NO: 345, SEQ ID NO: 346, SEQ ID NO: 347, SEQ ID NO: 348, SEQ ID NO: 349, SEQ ID NO: 350, SEQ ID NO: 351, SEQ ID NO: 352, SEQ ID NO: 353, SEQ ID NO: 354, SEQ ID NO: 355, SEQ ID NO: 356, SEQ ID NO: 357, SEQ ID NO: 358, SEQ ID NO: 359, SEQ ID NO: 360, SEQ ID NO: 361, SEQ ID NO: 362, SEQ ID NO: 363, SEQ ID NO: 364, SEQ ID NO: 365, SEQ ID NO: 366, SEQ ID NO: 367, SEQ ID NO: 368, SEQ ID NO: 369, SEQ ID NO: 370, SEQ ID NO: 371, SEQ ID NO: 372, SEQ ID NO: 373, SEQ ID NO: 374, SEQ ID NO: 375, SEQ ID NO: 376, SEQ ID NO: 377, SEQ ID NO: 378, or SEQ ID NO: 379.

[0202] In yet other aspects of this embodiment, a CXCL targeting domain comprises amino acids 35-107 or amino acids 40-102 of SEQ ID NO: 298, SEQ ID NO: 299, SEQ ID NO: 303, SEQ ID NO: 304, SEQ ID NO: 306, SEQ ID NO: 309, or SEQ ID NO: 310, amino acids 31-104 or amino acids 37-99 of SEQ ID NO: 300, or SEQ ID NO: 305, amino acids 24-96 or amino acids 30-92 of SEQ ID NO: 301, SEQ ID NO: 302, or SEQ ID NO: 312, amino acids 30-100 or amino acids 33-95 of SEQ ID NO: 307 or SEQ ID NO: 308, amino acids 30-100 or amino acids 33-87 of SEQ ID NO: 311, amino acids 32-101 or amino acids 38-100 of SEQ ID NO: 313, amino acids 22-83 or amino acids 22-71 of SEQ ID NO: 314 or SEQ ID NO: 315, amino acids 30-105, amino acids, 33-104 or amino acids 41-77 of SEQ ID NO: 317, amino acids 37-114 or amino acids 46-107 of SEQ ID NO: 318, or SEQ ID NO: 319, amino acids 35-112 or amino acids 45-106 of SEQ ID NO: 320, amino acids 41-132 or amino acids 50-11 of SEQ ID NO: 321, amino acids 38-130 or amino acids 47-109 of SEQ ID NO: 322, amino acids 38-114 or amino acids 46-107 of SEQ ID NO: 323, or SEQ ID NO: 324, amino acids 37-112 or amino acids 45-106 of SEQ ID NO: 325, amino acids 35-128, amino acids 44-128, amino acids 44-124 or amino acids 60-120 of SEQ ID NO: 326, amino acids 40-119 or amino acids 51-113 of SEQ ID NO: 327, amino acids 34-113 or amino acids 49-111 of SEQ ID NO: 328, amino acids 32-111 or amino acids 47-109 of SEQ ID NO: 329, amino acids 21-99 or amino acids 31-94 of SEQ ID NO: 330, SEQ ID NO: 331, or SEQ ID NO: 333, amino acids 23-101 or amino acids 31-84 of SEQ ID NO: 332, amino acids 17-103 or amino acids 30-93 SEQ ID NO: 334, amino acids 23-125 or amino acids 28-86 of SEQ ID NO: 335, or SEQ ID NO: 336, amino acids 23-125 or amino acids 27-89 of SEQ ID NO: 337, amino acids 24-126 or amino acids 28-90 of SEQ ID NO: 338, amino acids 22-125 or amino acids 29-85 of SEQ ID NO: 339, or SEQ ID NO: 340, amino acids 22-98 or amino acids 27-91 of SEQ ID NO: 341, SEQ ID NO: 342, or SEQ ID NO: 344, amino acids 22-102 or amino acids 27-89 of SEQ ID NO: 343, SEQ ID NO: 345, or SEQ ID NO: 346, amino acids 22-94, amino acids 28-91, or amino acids 28-77 of SEQ ID NO: 347, SEQ ID NO: 348, SEQ ID NO: 349, SEQ ID NO: 350, SEQ ID NO: 351, or SEQ ID NO: 352, amino acids 22-89 or amino acids 27-88 of SEQ ID NO: 353, SEQ ID NO: 354, SEQ ID NO: 355, SEQ ID NO: 356, SEQ ID NO: 357, SEQ ID NO: 358, or SEQ ID NO: 359, amino acids 23-109, amino acids 29-93 or amino acids 30-92 of SEQ ID NO: 360, SEQ ID NO: 361, SEQ ID NO: 362, or SEQ ID NO: 363, amino acids 22-108 or amino acids 29-88 of SEQ ID NO: 364, amino acids 35-111 or amino acids 45-97 SEQ ID NO: 365, or SEQ ID NO: 366, amino acids 223-99 or amino acids 33-85 of SEQ ID NO: 367, SEQ ID NO: 368, SEQ ID NO: 369, SEQ ID NO: 370, or SEQ ID NO: 371, amino acids 30-254, amino acids 30-205, or amino acids 32-107 of SEQ ID NO: 372, amino acids 26-252, amino acids 27-247, or amino acids 27-198 of SEQ ID NO: 373 or SEQ ID NO: 376, amino acids 25-250 or amino acids 25-200 of SEQ ID NO: 374, amino acids 27-246 or amino acids 27-201 of SEQ ID NO: 375, amino acids 147-312 or amino acids 150-252 of SEQ ID NO: 377, amino acids 145-310 or amino acids 148-250 of SEQ ID NO: 378, or amino acids 137-299 or amino acids 137-239 of SEQ ID NO: 379.

[0203] In other aspects of this embodiment, a CXCL targeting domain comprises a polypeptide having an amino acid identity of, e.g., at least 70%, at least 75%, at least 80%, at least 85%, at least 90% or at least 95% to SEQ ID NO: 298, SEQ ID NO: 299, SEQ ID NO: 300, SEQ ID NO: 301, SEQ ID NO: 302, SEQ ID NO: 303, SEQ ID NO: 304, SEQ ID NO: 305, SEQ ID NO: 306, SEQ ID NO: 307, SEQ ID NO: 308, SEQ ID NO: 309, SEQ ID NO: 310, SEQ ID NO: 311, SEQ ID NO: 312, SEQ ID NO: 313, SEQ ID NO: 314, SEQ ID NO: 315, SEQ ID NO: 316, SEQ ID NO: 317, SEQ ID NO: 318, SEQ ID NO: 319, SEQ ID NO: 320, SEQ ID NO: 321, SEQ ID NO: 322, SEQ ID NO: 323, SEQ ID NO: 324, SEQ ID NO: 325, SEQ ID NO: 326, SEQ ID NO: 327, SEQ ID NO: 328, SEQ ID NO: 329, SEQ ID NO: 330, SEQ ID NO: 331, SEQ ID NO: 332, SEQ ID NO: 333, SEQ ID NO: 334, SEQ ID NO: 335, SEQ ID NO: 336, SEQ ID NO: 337, SEQ ID NO: 338, SEQ ID NO: 339, SEQ ID NO: 340, SEQ ID NO: 341, SEQ ID NO: 342, SEQ ID NO: 343, SEQ ID NO: 344, SEQ ID NO: 345, SEQ ID NO: 346, SEQ ID NO: 347, SEQ ID NO: 348, SEQ ID NO: 349, SEQ ID NO: 350, SEQ ID NO: 351, SEQ ID NO: 352, SEQ ID NO: 353, SEQ ID NO: 354, SEQ ID NO: 355, SEQ ID NO: 356, SEQ ID NO: 357, SEQ ID NO: 358, SEQ ID NO: 359, SEQ ID NO: 360, SEQ ID NO: 361, SEQ ID NO: 362, SEQ ID NO: 363, SEQ ID NO: 364, SEQ ID NO: 365, SEQ ID NO: 366, SEQ ID NO: 367, SEQ ID NO: 368, SEQ ID NO: 369, SEQ ID NO: 370, SEQ ID NO: 371, SEQ ID NO: 372, SEQ ID NO: 373, SEQ ID NO: 374, SEQ ID NO: 375, SEQ ID NO: 376, SEQ ID NO: 377, SEQ ID NO: 378, or SEQ ID NO: 379; or at most 70%, at most 75%, at most 80%, at most 85%, at most 90% or at most 95% to SEQ ID NO: 298, SEQ ID NO: 299, SEQ ID NO: 300, SEQ ID NO: 301, SEQ ID NO: 302, SEQ ID NO: 303, SEQ ID NO: 304, SEQ ID NO: 305, SEQ ID NO: 306, SEQ ID NO: 307, SEQ ID NO: 308, SEQ ID NO: 309, SEQ ID NO: 310, SEQ ID NO: 311, SEQ ID NO: 312, SEQ ID NO: 313, SEQ ID NO: 314, SEQ ID NO: 315, SEQ ID NO: 316, SEQ ID NO: 317, SEQ ID NO: 318, SEQ ID NO: 319, SEQ ID NO: 320, SEQ ID NO: 321, SEQ ID NO: 322, SEQ ID NO: 323, SEQ ID NO: 324, SEQ ID NO: 325, SEQ ID NO: 326, SEQ ID NO: 327, SEQ ID NO: 328, SEQ ID NO: 329, SEQ ID NO: 330, SEQ ID NO: 331, SEQ ID NO: 332, SEQ ID NO: 333, SEQ ID NO: 334, SEQ ID NO: 335, SEQ ID NO: 336, SEQ ID NO: 337, SEQ ID NO: 338, SEQ ID NO: 339, SEQ ID NO: 340, SEQ ID NO: 341, SEQ ID NO: 342, SEQ ID NO: 343, SEQ ID NO: 344, SEQ ID NO: 345, SEQ ID NO: 346, SEQ ID NO: 347, SEQ ID NO: 348, SEQ ID NO: 349, SEQ ID NO: 350, SEQ ID NO: 351, SEQ ID NO: 352, SEQ ID NO: 353, SEQ ID NO: 354, SEQ ID NO: 355, SEQ ID NO: 356, SEQ ID NO: 357, SEQ ID NO: 358, SEQ ID NO: 359, SEQ ID NO: 360, SEQ ID NO: 361, SEQ ID NO: 362, SEQ ID NO: 363, SEQ ID NO: 364, SEQ ID NO: 365, SEQ ID NO: 366, SEQ ID NO: 367, SEQ ID NO: 368, SEQ ID NO: 369, SEQ ID NO: 370, SEQ ID NO: 371, SEQ ID NO: 372, SEQ ID NO: 373, SEQ ID NO: 374, SEQ ID NO: 375, SEQ ID NO: 376, SEQ ID NO: 377, SEQ ID NO: 378, or SEQ ID NO: 379. In yet other aspects of this embodiment, a CXCL targeting domain comprises a polypeptide having, e.g., at least 1, 2, 3, 4, 5, 6, 7, 8, 9, 10, 15 or 20 non-contiguous amino acid deletions, additions, and/or substitutions relative to SEQ ID NO: 298, SEQ ID NO: 299, SEQ ID NO: 300, SEQ ID NO: 301, SEQ ID NO: 302, SEQ ID NO: 303, SEQ ID NO: 304, SEQ ID NO: 305, SEQ ID NO: 306, SEQ ID NO: 307, SEQ ID NO: 308, SEQ ID NO: 309, SEQ ID NO: 310, SEQ ID NO: 311, SEQ ID NO: 312, SEQ ID NO: 313, SEQ ID NO: 314, SEQ ID NO: 315, SEQ ID NO: 316, SEQ ID NO: 317, SEQ ID NO: 318, SEQ ID NO: 319, SEQ ID NO: 320, SEQ ID NO: 321, SEQ ID NO: 322, SEQ ID NO: 323, SEQ ID NO: 324, SEQ ID NO: 325, SEQ ID NO: 326, SEQ ID NO: 327, SEQ ID NO: 328, SEQ ID NO: 329, SEQ ID NO: 330, SEQ ID NO: 331, SEQ ID NO: 332, SEQ ID NO: 333, SEQ ID NO: 334, SEQ ID NO: 335, SEQ ID NO: 336, SEQ ID NO: 337, SEQ ID NO: 338, SEQ ID NO: 339, SEQ ID NO: 340, SEQ ID NO: 341, SEQ ID NO: 342, SEQ ID NO: 343, SEQ ID NO: 344, SEQ ID NO: 345, SEQ ID NO: 346, SEQ ID NO: 347, SEQ ID NO: 348, SEQ ID NO: 349, SEQ ID NO: 350, SEQ ID NO: 351, SEQ ID NO: 352, SEQ ID NO: 353, SEQ ID NO: 354, SEQ ID NO: 355, SEQ ID NO: 356, SEQ ID NO: 357, SEQ ID NO: 358, SEQ ID NO: 359, SEQ ID NO: 360, SEQ ID NO: 361, SEQ ID NO: 362, SEQ ID NO: 363, SEQ ID NO: 364, SEQ ID NO: 365, SEQ ID NO: 366, SEQ ID NO: 367, SEQ ID NO: 368, SEQ ID NO: 369, SEQ ID NO: 370, SEQ ID NO: 371, SEQ ID NO: 372, SEQ ID NO: 373, SEQ ID NO: 374, SEQ ID NO: 375, SEQ ID NO: 376, SEQ ID NO: 377, SEQ ID NO: 378, or SEQ ID NO: 379; or at most 1, 2, 3, 4, 5, 6, 7, 8, 9, 10, 15 or 20 non-contiguous amino acid deletions, additions, and/or substitutions relative to SEQ ID NO: 298, SEQ ID NO: 299, SEQ ID NO: 300, SEQ ID NO: 301, SEQ ID NO: 302, SEQ ID NO: 303, SEQ ID NO: 304, SEQ ID NO: 305, SEQ ID NO: 306, SEQ ID NO: 307, SEQ ID NO: 308, SEQ ID NO: 309, SEQ ID NO: 310, SEQ ID NO: 311, SEQ ID NO: 312, SEQ ID NO: 313, SEQ ID NO: 314, SEQ ID NO: 315, SEQ ID NO: 316, SEQ ID NO: 317, SEQ ID NO: 318, SEQ ID NO: 319, SEQ ID NO: 320, SEQ ID NO: 321, SEQ ID NO: 322, SEQ ID NO: 323, SEQ ID NO: 324, SEQ ID NO: 325, SEQ ID NO: 326, SEQ ID NO: 327, SEQ ID NO: 328, SEQ ID NO: 329, SEQ ID NO: 330, SEQ ID NO: 331, SEQ ID NO: 332, SEQ ID NO: 333, SEQ ID NO: 334, SEQ ID NO: 335, SEQ ID NO: 336, SEQ ID NO: 337, SEQ ID NO: 338, SEQ ID NO: 339, SEQ ID NO: 340, SEQ ID NO: 341, SEQ ID NO: 342, SEQ ID NO: 343, SEQ ID NO: 344, SEQ ID NO: 345, SEQ ID NO: 346, SEQ ID NO: 347, SEQ ID NO: 348, SEQ ID NO: 349, SEQ ID NO: 350, SEQ ID NO: 351, SEQ ID NO: 352, SEQ ID NO: 353, SEQ ID NO: 354, SEQ ID NO: 355, SEQ ID NO: 356, SEQ ID NO: 357, SEQ ID NO: 358, SEQ ID NO: 359, SEQ ID NO: 360, SEQ ID NO: 361, SEQ ID NO: 362, SEQ ID NO: 363, SEQ ID NO: 364, SEQ ID NO: 365, SEQ ID NO: 366, SEQ ID NO: 367, SEQ ID NO: 368, SEQ ID NO: 369, SEQ ID NO: 370, SEQ ID NO: 371, SEQ ID NO: 372, SEQ ID NO: 373, SEQ ID NO: 374, SEQ ID NO: 375, SEQ ID NO: 376, SEQ ID NO: 377, SEQ ID NO: 378, or SEQ ID NO: 379. In still other aspects of this embodiment, a CXCL targeting domain comprises a polypeptide having, e.g., at least 1, 2, 3, 4, 5, 6, 7, 8, 9, 10, 15 or 20 contiguous amino acid deletions, additions, and/or substitutions relative to SEQ ID NO: 298, SEQ ID NO: 299, SEQ ID NO: 300, SEQ ID NO: 301, SEQ ID NO: 302, SEQ ID NO: 303, SEQ ID NO: 304, SEQ ID NO: 305, SEQ ID NO: 306, SEQ ID NO: 307, SEQ ID NO: 308, SEQ ID NO: 309, SEQ ID NO: 310, SEQ ID NO: 311, SEQ ID NO: 312, SEQ ID NO: 313, SEQ ID NO: 314, SEQ ID NO: 315, SEQ ID NO: 316, SEQ ID NO: 317, SEQ ID NO: 318, SEQ ID NO: 319, SEQ ID NO: 320, SEQ ID NO: 321, SEQ ID NO: 322, SEQ ID NO: 323, SEQ ID NO: 324, SEQ ID NO: 325, SEQ ID NO: 326, SEQ ID NO: 327, SEQ ID NO: 328, SEQ ID NO: 329, SEQ ID NO: 330, SEQ ID NO: 331, SEQ ID NO: 332, SEQ ID NO: 333, SEQ ID NO: 334, SEQ ID NO: 335, SEQ ID NO: 336, SEQ ID NO: 337, SEQ ID NO: 338, SEQ ID NO: 339, SEQ ID NO: 340, SEQ ID NO: 341, SEQ ID NO: 342, SEQ ID NO: 343, SEQ ID NO: 344, SEQ ID NO: 345, SEQ ID NO: 346, SEQ ID NO: 347, SEQ ID NO: 348, SEQ ID NO: 349, SEQ ID NO: 350, SEQ ID NO: 351, SEQ ID NO: 352, SEQ ID NO: 353, SEQ ID NO: 354, SEQ ID NO: 355, SEQ ID NO: 356, SEQ ID NO: 357, SEQ ID NO: 358, SEQ ID NO: 359, SEQ ID NO: 360, SEQ ID NO: 361, SEQ ID NO: 362, SEQ ID NO: 363, SEQ ID NO: 364, SEQ ID NO: 365, SEQ ID NO: 366, SEQ ID NO: 367, SEQ ID NO: 368, SEQ ID NO: 369, SEQ ID NO: 370, SEQ ID NO: 371, SEQ ID NO: 372, SEQ ID NO: 373, SEQ ID NO: 374, SEQ ID NO: 375, SEQ ID NO: 376, SEQ ID NO: 377, SEQ ID NO: 378, or SEQ ID NO: 379; or at most 1, 2, 3, 4, 5, 6, 7, 8, 9, 10, 15 or 20 contiguous amino acid deletions, additions, and/or substitutions relative to SEQ ID NO: 298, SEQ ID NO: 299, SEQ ID NO: 300, SEQ ID NO: 301, SEQ ID NO: 302, SEQ ID NO: 303, SEQ ID NO: 304, SEQ ID NO: 305, SEQ ID NO: 306, SEQ ID NO: 307, SEQ ID NO: 308, SEQ ID NO: 309, SEQ ID NO: 310, SEQ ID NO: 311, SEQ ID NO: 312, SEQ ID NO: 313, SEQ ID NO: 314, SEQ ID NO: 315, SEQ ID NO: 316, SEQ ID NO: 317, SEQ ID NO: 318, SEQ ID NO: 319, SEQ ID NO: 320, SEQ ID NO: 321, SEQ ID NO: 322, SEQ ID NO: 323, SEQ ID NO: 324, SEQ ID NO: 325, SEQ ID NO: 326, SEQ ID NO: 327, SEQ ID NO: 328, SEQ ID NO: 329, SEQ ID NO: 330, SEQ ID NO: 331, SEQ ID NO: 332, SEQ ID NO: 333, SEQ ID NO: 334, SEQ ID NO: 335, SEQ ID NO: 336, SEQ ID NO: 337, SEQ ID NO: 338, SEQ ID NO: 339, SEQ ID NO: 340, SEQ ID NO: 341, SEQ ID NO: 342, SEQ ID NO: 343, SEQ ID NO: 344, SEQ ID NO: 345, SEQ ID NO: 346, SEQ ID NO: 347, SEQ ID NO: 348, SEQ ID NO: 349, SEQ ID NO: 350, SEQ ID NO: 351, SEQ ID NO: 352, SEQ ID NO: 353, SEQ ID NO: 354, SEQ ID NO: 355, SEQ ID NO: 356, SEQ ID NO: 357, SEQ ID NO: 358, SEQ ID NO: 359, SEQ ID NO: 360, SEQ ID NO: 361, SEQ ID NO: 362, SEQ ID NO: 363, SEQ ID NO: 364, SEQ ID NO: 365, SEQ ID NO: 366, SEQ ID NO: 367, SEQ ID NO: 368, SEQ ID NO: 369, SEQ ID NO: 370, SEQ ID NO: 371, SEQ ID NO: 372, SEQ ID NO: 373, SEQ ID NO: 374, SEQ ID NO: 375, SEQ ID NO: 376, SEQ ID NO: 377, SEQ ID NO: 378, or SEQ ID NO: 379.

[0204] In other aspects of this embodiment, a CXCL targeting domain comprises a polypeptide having an amino acid identity of, e.g., at least 70%, at least 75%, at least 80%, at least 85%, at least 90% or at least 95% to amino acids 35-107 or amino acids 40-102 of SEQ ID NO: 298, SEQ ID NO: 299, SEQ ID NO: 303, SEQ ID NO: 304, SEQ ID NO: 306, SEQ ID NO: 309, or SEQ ID NO: 310, amino acids 31-104 or amino acids 37-99 of SEQ ID NO: 300, or SEQ ID NO: 305, amino acids 24-96 or amino acids 30-92 of SEQ ID NO: 301, SEQ ID NO: 302, or SEQ ID NO: 312, amino acids 30-100 or amino acids 33-95 of SEQ ID NO: 307 or SEQ ID NO: 308, amino acids 30-100 or amino acids 33-87 of SEQ ID NO: 311, amino acids 32-101 or amino acids 38-100 of SEQ ID NO: 313, amino acids 22-83 or amino acids 22-71 of SEQ ID NO: 314 or SEQ ID NO: 315, amino acids 30-105, amino acids, 33-104 or amino acids 41-77 of SEQ ID NO: 317, amino acids 37-114 or amino acids 46-107 of SEQ ID NO: 318, or SEQ ID NO: 319, amino acids 35-112 or amino acids 45-106 of SEQ ID NO: 320, amino acids 41-132 or amino acids 50-11 of SEQ ID NO: 321, amino acids 38-130 or amino acids 47-109 of SEQ ID NO: 322, amino acids 38-114 or amino acids 46-107 of SEQ ID NO: 323, or SEQ ID NO: 324, amino acids 37-112 or amino acids 45-106 of SEQ ID NO: 325, amino acids 35-128, amino acids 44-128, amino acids 44-124 or amino acids 60-120 of SEQ ID NO: 326, amino acids 40-119 or amino acids 51-113 of SEQ ID NO: 327, amino acids 34-113 or amino acids 49-111 of SEQ ID NO: 328, amino acids 32-111 or amino acids 47-109 of SEQ ID NO: 329, amino acids 21-99 or amino acids 31-94 of SEQ ID NO: 330, SEQ ID NO: 331, or SEQ ID NO: 333, amino acids 23-101 or amino acids 31-84 of SEQ ID NO: 332, amino acids 17-103 or amino acids 30-93 SEQ ID NO: 334, amino acids 23-125 or amino acids 28-86 of SEQ ID NO: 335, or SEQ ID NO: 336, amino acids 23-125 or amino acids 27-89 of SEQ ID NO: 337, amino acids 24-126 or amino acids 28-90 of SEQ ID NO: 338, amino acids 22-125 or amino acids 29-85 of SEQ ID NO: 339, or SEQ ID NO: 340, amino acids 22-98 or amino acids 27-91 of SEQ ID NO: 341, SEQ ID NO: 342, or SEQ ID NO: 344, amino acids 22-102 or amino acids 27-89 of SEQ ID NO: 343, SEQ ID NO: 345, or SEQ ID NO: 346, amino acids 22-94, amino acids 28-91, or amino acids 28-77 of SEQ ID NO: 347, SEQ ID NO: 348, SEQ ID NO: 349, SEQ ID NO: 350, SEQ ID NO: 351, or SEQ ID NO: 352, amino acids 22-89 or amino acids 27-88 of SEQ ID NO: 353, SEQ ID NO: 354, SEQ ID NO: 355, SEQ ID NO: 356, SEQ ID NO: 357, SEQ ID NO: 358, or SEQ ID NO: 359, amino acids 23-109, amino acids 29-93 or amino acids 30-92 of SEQ ID NO: 360, SEQ ID NO: 361, SEQ ID NO: 362, or SEQ ID NO: 363, amino acids 22-108 or amino acids 29-88 of SEQ ID NO: 364, amino acids 35-111 or amino acids 45-97 SEQ ID NO: 365, or SEQ ID NO: 366, amino acids 223-99 or amino acids 33-85 of SEQ ID NO: 367, SEQ ID NO: 368, SEQ ID NO: 369, SEQ ID NO: 370, or SEQ ID NO: 371, amino acids 30-254, amino acids 30-205, or amino acids 32-107 of SEQ ID NO: 372, amino acids 26-252, amino acids 27-247, or amino acids 27-198 of SEQ ID NO: 373 or SEQ ID NO: 376, amino acids 25-250 or amino acids 25-200 of SEQ ID NO: 374, amino acids 27-246 or amino acids 27-201 of SEQ ID NO: 375, amino acids 147-312 or amino acids 150-252 of SEQ ID NO: 377, amino acids 145-310 or amino acids 148-250 of SEQ ID NO: 378, or amino acids 137-299 or amino acids 137-239 of SEQ ID NO: 379; or at most 70%, at most 75%, at most 80%, at most 85%, at most 90% or at most 95% to amino acids 35-107 or amino acids 40-102 of SEQ ID NO: 298, SEQ ID NO: 299, SEQ ID NO: 303, SEQ ID NO: 304, SEQ ID NO: 306, SEQ ID NO: 309, or SEQ ID NO: 310, amino acids 31-104 or amino acids 37-99 of SEQ ID NO: 300, or SEQ ID NO: 305, amino acids 24-96 or amino acids 30-92 of SEQ ID NO: 301, SEQ ID NO: 302, or SEQ ID NO: 312, amino acids 30-100 or amino acids 33-95 of SEQ ID NO: 307 or SEQ ID NO: 308, amino acids 30-100 or amino acids 33-87 of SEQ ID NO: 311, amino acids 32-101 or amino acids 38-100 of SEQ ID NO: 313, amino acids 22-83 or amino acids 22-71 of SEQ ID NO: 314 or SEQ ID NO: 315, amino acids 30-105, amino acids, 33-104 or amino acids 41-77 of SEQ ID NO: 317, amino acids 37-114 or amino acids 46-107 of SEQ ID NO: 318, or SEQ ID NO: 319, amino acids 35-112 or amino acids 45-106 of SEQ ID NO: 320, amino acids 41-132 or amino acids 50-11 of SEQ ID NO: 321, amino acids 38-130 or amino acids 47-109 of SEQ ID NO: 322, amino acids 38-114 or amino acids 46-107 of SEQ ID NO: 323, or SEQ ID NO: 324, amino acids 37-112 or amino acids 45-106 of SEQ ID NO: 325, amino acids 35-128, amino acids 44-128, amino acids 44-124 or amino acids 60-120 of SEQ ID NO: 326, amino acids 40-119 or amino acids 51-113 of SEQ ID NO: 327, amino acids 34-113 or amino acids 49-111 of SEQ ID NO: 328, amino acids 32-111 or amino acids 47-109 of SEQ ID NO: 329, amino acids 21-99 or amino acids 31-94 of SEQ ID NO: 330, SEQ ID NO: 331, or SEQ ID NO: 333, amino acids 23-101 or amino acids 31-84 of SEQ ID NO: 332, amino acids 17-103 or amino acids 30-93 SEQ ID NO: 334, amino acids 23-125 or amino acids 28-86 of SEQ ID NO: 335, or SEQ ID NO: 336, amino acids 23-125 or amino acids 27-89 of SEQ ID NO: 337, amino acids 24-126 or amino acids 28-90 of SEQ ID NO: 338, amino acids 22-125 or amino acids 29-85 of SEQ ID NO: 339, or SEQ ID NO: 340, amino acids 22-98 or amino acids 27-91 of SEQ ID NO: 341, SEQ ID NO: 342, or SEQ ID NO: 344, amino acids 22-102 or amino acids 27-89 of SEQ ID NO: 343, SEQ ID NO: 345, or SEQ ID NO: 346, amino acids 22-94, amino acids 28-91, or amino acids 28-77 of SEQ ID NO: 347, SEQ ID NO: 348, SEQ ID NO: 349, SEQ ID NO: 350, SEQ ID NO: 351, or SEQ ID NO: 352, amino acids 22-89 or amino acids 27-88 of SEQ ID NO: 353, SEQ ID NO: 354, SEQ ID NO: 355, SEQ ID NO: 356, SEQ ID NO: 357, SEQ ID NO: 358, or SEQ ID NO: 359, amino acids 23-109, amino acids 29-93 or amino acids 30-92 of SEQ ID NO: 360, SEQ ID NO: 361, SEQ ID NO: 362, or SEQ ID NO: 363, amino acids 22-108 or amino acids 29-88 of SEQ ID NO: 364, amino acids 35-111 or amino acids 45-97 SEQ ID NO: 365, or SEQ ID NO: 366, amino acids 223-99 or amino acids 33-85 of SEQ ID NO: 367, SEQ ID NO: 368, SEQ ID NO: 369, SEQ ID NO: 370, or SEQ ID NO: 371, amino acids 30-254, amino acids 30-205, or amino acids 32-107 of SEQ ID NO: 372, amino acids 26-252, amino acids 27-247, or amino acids 27-198 of SEQ ID NO: 373 or SEQ ID NO: 376, amino acids 25-250 or amino acids 25-200 of SEQ ID NO: 374, amino acids 27-246 or amino acids 27-201 of SEQ ID NO: 375, amino acids 147-312 or amino acids 150-252 of SEQ ID NO: 377, amino acids 145-310 or amino acids 148-250 of SEQ ID NO: 378, or amino acids 137-299 or amino acids 137-239 of SEQ ID NO: 379.

[0205] In yet other aspects of this embodiment, a CXCL targeting domain comprises a polypeptide having, e.g., at least 1, 2, 3, 4, 5, 6, 7, 8, 9, 10, 15 or 20 non-contiguous amino acid deletions, additions, and/or substitutions relative to amino acids 35-107 or amino acids 40-102 of SEQ ID NO: 298, SEQ ID NO: 299, SEQ ID NO: 303, SEQ ID NO: 304, SEQ ID NO: 306, SEQ ID NO: 309, or SEQ ID NO: 310, amino acids 31-104 or amino acids 37-99 of SEQ ID NO: 300, or SEQ ID NO: 305, amino acids 24-96 or amino acids 30-92 of SEQ ID NO: 301, SEQ ID NO: 302, or SEQ ID NO: 312, amino acids 30-100 or amino acids 33-95 of SEQ ID NO: 307 or SEQ ID NO: 308, amino acids 30-100 or amino acids 33-87 of SEQ ID NO: 311, amino acids 32-101 or amino acids 38-100 of SEQ ID NO: 313, amino acids 22-83 or amino acids 22-71 of SEQ ID NO: 314 or SEQ ID NO: 315, amino acids 30-105, amino acids, 33-104 or amino acids 41-77 of SEQ ID NO: 317, amino acids 37-114 or amino acids 46-107 of SEQ ID NO: 318, or SEQ ID NO: 319, amino acids 35-112 or amino acids 45-106 of SEQ ID NO: 320, amino acids 41-132 or amino acids 50-11 of SEQ ID NO: 321, amino acids 38-130 or amino acids 47-109 of SEQ ID NO: 322, amino acids 38-114 or amino acids 46-107 of SEQ ID NO: 323, or SEQ ID NO: 324, amino acids 37-112 or amino acids 45-106 of SEQ ID NO: 325, amino acids 35-128, amino acids 44-128, amino acids 44-124 or amino acids 60-120 of SEQ ID NO: 326, amino acids 40-119 or amino acids 51-113 of SEQ ID NO: 327, amino acids 34-113 or amino acids 49-111 of SEQ ID NO: 328, amino acids 32-111 or amino acids 47-109 of SEQ ID NO: 329, amino acids 21-99 or amino acids 31-94 of SEQ ID NO: 330, SEQ ID NO: 331, or SEQ ID NO: 333, amino acids 23-101 or amino acids 31-84 of SEQ ID NO: 332, amino acids 17-103 or amino acids 30-93 SEQ ID NO: 334, amino acids 23-125 or amino acids 28-86 of SEQ ID NO: 335, or SEQ ID NO: 336, amino acids 23-125 or amino acids 27-89 of SEQ ID NO: 337, amino acids 24-126 or amino acids 28-90 of SEQ ID NO: 338, amino acids 22-125 or amino acids 29-85 of SEQ ID NO: 339, or SEQ ID NO: 340, amino acids 22-98 or amino acids 27-91 of SEQ ID NO: 341, SEQ ID NO: 342, or SEQ ID NO: 344, amino acids 22-102 or amino acids 27-89 of SEQ ID NO: 343, SEQ ID NO: 345, or SEQ ID NO: 346, amino acids 22-94, amino acids 28-91, or amino acids 28-77 of SEQ ID NO: 347, SEQ ID NO: 348, SEQ ID NO: 349, SEQ ID NO: 350, SEQ ID NO: 351, or SEQ ID NO: 352, amino acids 22-89 or amino acids 27-88 of SEQ ID NO: 353, SEQ ID NO: 354, SEQ ID NO: 355, SEQ ID NO: 356, SEQ ID NO: 357, SEQ ID NO: 358, or SEQ ID NO: 359, amino acids 23-109, amino acids 29-93 or amino acids 30-92 of SEQ ID NO: 360, SEQ ID NO: 361, SEQ ID NO: 362, or SEQ ID NO: 363, amino acids 22-108 or amino acids 29-88 of SEQ ID NO: 364, amino acids 35-111 or amino acids 45-97 SEQ ID NO: 365, or SEQ ID NO: 366, amino acids 223-99 or amino acids 33-85 of SEQ ID NO: 367, SEQ ID NO: 368, SEQ ID NO: 369, SEQ ID NO: 370, or SEQ ID NO: 371, amino acids 30-254, amino acids 30-205, or amino acids 32-107 of SEQ ID NO: 372, amino acids 26-252, amino acids 27-247, or amino acids 27-198 of SEQ ID NO: 373 or SEQ ID NO: 376, amino acids 25-250 or amino acids 25-200 of SEQ ID NO: 374, amino acids 27-246 or amino acids 27-201 of SEQ ID NO: 375, amino acids 147-312 or amino acids 150-252 of SEQ ID NO: 377, amino acids 145-310 or amino acids 148-250 of SEQ ID NO: 378, or amino acids 137-299 or amino acids 137-239 of SEQ ID NO: 379; or at most 1, 2, 3, 4, 5, 6, 7, 8, 9, 10, 15 or 20 non-contiguous amino acid deletions, additions, and/or substitutions relative to amino acids 35-107 or amino acids 40-102 of SEQ ID NO: 298, SEQ ID NO: 299, SEQ ID NO: 303, SEQ ID NO: 304, SEQ ID NO: 306, SEQ ID NO: 309, or SEQ ID NO: 310, amino acids 31-104 or amino acids 37-99 of SEQ ID NO: 300, or SEQ ID NO: 305, amino acids 24-96 or amino acids 30-92 of SEQ ID NO: 301, SEQ ID NO: 302, or SEQ ID NO: 312, amino acids 30-100 or amino acids 33-95 of SEQ ID NO: 307 or SEQ ID NO: 308, amino acids 30-100 or amino acids 33-87 of SEQ ID NO: 311, amino acids 32-101 or amino acids 38-100 of SEQ ID NO: 313, amino acids 22-83 or amino acids 22-71 of SEQ ID NO: 314 or SEQ ID NO: 315, amino acids 30-105, amino acids, 33-104 or amino acids 41-77 of SEQ ID NO: 317, amino acids 37-114 or amino acids 46-107 of SEQ ID NO: 318, or SEQ ID NO: 319, amino acids 35-112 or amino acids 45-106 of SEQ ID NO: 320, amino acids 41-132 or amino acids 50-11 of SEQ ID NO: 321, amino acids 38-130 or amino acids 47-109 of SEQ ID NO: 322, amino acids 38-114 or amino acids 46-107 of SEQ ID NO: 323, or SEQ ID NO: 324, amino acids 37-112 or amino acids 45-106 of SEQ ID NO: 325, amino acids 35-128, amino acids 44-128, amino acids 44-124 or amino acids 60-120 of SEQ ID NO: 326, amino acids 40-119 or amino acids 51-113 of SEQ ID NO: 327, amino acids 34-113 or amino acids 49-111 of SEQ ID NO: 328, amino acids 32-111 or amino acids 47-109 of SEQ ID NO: 329, amino acids 21-99 or amino acids 31-94 of SEQ ID NO: 330, SEQ ID NO: 331, or SEQ ID NO: 333, amino acids 23-101 or amino acids 31-84 of SEQ ID NO: 332, amino acids 17-103 or amino acids 30-93 SEQ ID NO: 334, amino acids 23-125 or amino acids 28-86 of SEQ ID NO: 335, or SEQ ID NO: 336, amino acids 23-125 or amino acids 27-89 of SEQ ID NO: 337, amino acids 24-126 or amino acids 28-90 of SEQ ID NO: 338, amino acids 22-125 or amino acids 29-85 of SEQ ID NO: 339, or SEQ ID NO: 340, amino acids 22-98 or amino acids 27-91 of SEQ ID NO: 341, SEQ ID NO: 342, or SEQ ID NO: 344, amino acids 22-102 or amino acids 27-89 of SEQ ID NO: 343, SEQ ID NO: 345, or SEQ ID NO: 346, amino acids 22-94, amino acids 28-91, or amino acids 28-77 of SEQ ID NO: 347, SEQ ID NO: 348, SEQ ID NO: 349, SEQ ID NO: 350, SEQ ID NO: 351, or SEQ ID NO: 352, amino acids 22-89 or amino acids 27-88 of SEQ ID NO: 353, SEQ ID NO: 354, SEQ ID NO: 355, SEQ ID NO: 356, SEQ ID NO: 357, SEQ ID NO: 358, or SEQ ID NO: 359, amino acids 23-109, amino acids 29-93 or amino acids 30-92 of SEQ ID NO: 360, SEQ ID NO: 361, SEQ ID NO: 362, or SEQ ID NO: 363, amino acids 22-108 or amino acids 29-88 of SEQ ID NO: 364, amino acids 35-111 or amino acids 45-97 SEQ ID NO: 365, or SEQ ID NO: 366, amino acids 223-99 or amino acids 33-85 of SEQ ID NO: 367, SEQ ID NO: 368, SEQ ID NO: 369, SEQ ID NO: 370, or SEQ ID NO: 371, amino acids 30-254, amino acids 30-205, or amino acids 32-107 of SEQ ID NO: 372, amino acids 26-252, amino acids 27-247, or amino acids 27-198 of SEQ ID NO: 373 or SEQ ID NO: 376, amino acids 25-250 or amino acids 25-200 of SEQ ID NO: 374, amino acids 27-246 or amino acids 27-201 of SEQ ID NO: 375, amino acids 147-312 or amino acids 150-252 of SEQ ID NO: 377, amino acids 145-310 or amino acids 148-250 of SEQ ID NO: 378, or amino acids 137-299 or amino acids 137-239 of SEQ ID NO: 379.

[0206] In still other aspects of this embodiment, a CXCL targeting domain comprises a polypeptide having, e.g., at least 1, 2, 3, 4, 5, 6, 7, 8, 9, 10, 15 or 20 contiguous amino acid deletions, additions, and/or substitutions relative to amino acids 35-107 or amino acids 40-102 of SEQ ID NO: 298, SEQ ID NO: 299, SEQ ID NO: 303, SEQ ID NO: 304, SEQ ID NO: 306, SEQ ID NO: 309, or SEQ ID NO: 310, amino acids 31-104 or amino acids 37-99 of SEQ ID NO: 300, or SEQ ID NO: 305, amino acids 24-96 or amino acids 30-92 of SEQ ID NO: 301, SEQ ID NO: 302, or SEQ ID NO: 312, amino acids 30-100 or amino acids 33-95 of SEQ ID NO: 307 or SEQ ID NO: 308, amino acids 30-100 or amino acids 33-87 of SEQ ID NO: 311, amino acids 32-101 or amino acids 38-100 of SEQ ID NO: 313, amino acids 22-83 or amino acids 22-71 of SEQ ID NO: 314 or SEQ ID NO: 315, amino acids 30-105, amino acids, 33-104 or amino acids 41-77 of SEQ ID NO: 317, amino acids 37-114 or amino acids 46-107 of SEQ ID NO: 318, or SEQ ID NO: 319, amino acids 35-112 or amino acids 45-106 of SEQ ID NO: 320, amino acids 41-132 or amino acids 50-11 of SEQ ID NO: 321, amino acids 38-130 or amino acids 47-109 of SEQ ID NO: 322, amino acids 38-114 or amino acids 46-107 of SEQ ID NO: 323, or SEQ ID NO: 324, amino acids 37-112 or amino acids 45-106 of SEQ ID NO: 325, amino acids 35-128, amino acids 44-128, amino acids 44-124 or amino acids 60-120 of SEQ ID NO: 326, amino acids 40-119 or amino acids 51-113 of SEQ ID NO: 327, amino acids 34-113 or amino acids 49-111 of SEQ ID NO: 328, amino acids 32-111 or amino acids 47-109 of SEQ ID NO: 329, amino acids 21-99 or amino acids 31-94 of SEQ ID NO: 330, SEQ ID NO: 331, or SEQ ID NO: 333, amino acids 23-101 or amino acids 31-84 of SEQ ID NO: 332, amino acids 17-103 or amino acids 30-93 SEQ ID NO: 334, amino acids 23-125 or amino acids 28-86 of SEQ ID NO: 335, or SEQ ID NO: 336, amino acids 23-125 or amino acids 27-89 of SEQ ID NO: 337, amino acids 24-126 or amino acids 28-90 of SEQ ID NO: 338, amino acids 22-125 or amino acids 29-85 of SEQ ID NO: 339, or SEQ ID NO: 340, amino acids 22-98 or amino acids 27-91 of SEQ ID NO: 341, SEQ ID NO: 342, or SEQ ID NO: 344, amino acids 22-102 or amino acids 27-89 of SEQ ID NO: 343, SEQ ID NO: 345, or SEQ ID NO: 346, amino acids 22-94, amino acids 28-91, or amino acids 28-77 of SEQ ID NO: 347, SEQ ID NO: 348, SEQ ID NO: 349, SEQ ID NO: 350, SEQ ID NO: 351, or SEQ ID NO: 352, amino acids 22-89 or amino acids 27-88 of SEQ ID NO: 353, SEQ ID NO: 354, SEQ ID NO: 355, SEQ ID NO: 356, SEQ ID NO: 357, SEQ ID NO: 358, or SEQ ID NO: 359, amino acids 23-109, amino acids 29-93 or amino acids 30-92 of SEQ ID NO: 360, SEQ ID NO: 361, SEQ ID NO: 362, or SEQ ID NO: 363, amino acids 22-108 or amino acids 29-88 of SEQ ID NO: 364, amino acids 35-111 or amino acids 45-97 SEQ ID NO: 365, or SEQ ID NO: 366, amino acids 223-99 or amino acids 33-85 of SEQ ID NO: 367, SEQ ID NO: 368, SEQ ID NO: 369, SEQ ID NO: 370, or SEQ ID NO: 371, amino acids 30-254, amino acids 30-205, or amino acids 32-107 of SEQ ID NO: 372, amino acids 26-252, amino acids 27-247, or amino acids 27-198 of SEQ ID NO: 373 or SEQ ID NO: 376, amino acids 25-250 or amino acids 25-200 of SEQ ID NO: 374, amino acids 27-246 or amino acids 27-201 of SEQ ID NO: 375, amino acids 147-312 or amino acids 150-252 of SEQ ID NO: 377, amino acids 145-310 or amino acids 148-250 of SEQ ID NO: 378, or amino acids 137-299 or amino acids 137-239 of SEQ ID NO: 379; or at most 1, 2, 3, 4, 5, 6, 7, 8, 9, 10, 15 or 20 contiguous amino acid deletions, additions, and/or substitutions relative to amino acids 35-107 or amino acids 40-102 of SEQ ID NO: 298, SEQ ID NO: 299, SEQ ID NO: 303, SEQ ID NO: 304, SEQ ID NO: 306, SEQ ID NO: 309, or SEQ ID NO: 310, amino acids 31-104 or amino acids 37-99 of SEQ ID NO: 300, or SEQ ID NO: 305, amino acids 24-96 or amino acids 30-92 of SEQ ID NO: 301, SEQ ID NO: 302, or SEQ ID NO: 312, amino acids 30-100 or amino acids 33-95 of SEQ ID NO: 307 or SEQ ID NO: 308, amino acids 30-100 or amino acids 33-87 of SEQ ID NO: 311, amino acids 32-101 or amino acids 38-100 of SEQ ID NO: 313, amino acids 22-83 or amino acids 22-71 of SEQ ID NO: 314 or SEQ ID NO: 315, amino acids 30-105, amino acids, 33-104 or amino acids 41-77 of SEQ ID NO: 317, amino acids 37-114 or amino acids 46-107 of SEQ ID NO: 318, or SEQ ID NO: 319, amino acids 35-112 or amino acids 45-106 of SEQ ID NO: 320, amino acids 41-132 or amino acids 50-11 of SEQ ID NO: 321, amino acids 38-130 or amino acids 47-109 of SEQ ID NO: 322, amino acids 38-114 or amino acids 46-107 of SEQ ID NO: 323, or SEQ ID NO: 324, amino acids 37-112 or amino acids 45-106 of SEQ ID NO: 325, amino acids 35-128, amino acids 44-128, amino acids 44-124 or amino acids 60-120 of SEQ ID NO: 326, amino acids 40-119 or amino acids 51-113 of SEQ ID NO: 327, amino acids 34-113 or amino acids 49-111 of SEQ ID NO: 328, amino acids 32-111 or amino acids 47-109 of SEQ ID NO: 329, amino acids 21-99 or amino acids 31-94 of SEQ ID NO: 330, SEQ ID NO: 331, or SEQ ID NO: 333, amino acids 23-101 or amino acids 31-84 of SEQ ID NO: 332, amino acids 17-103 or amino acids 30-93 SEQ ID NO: 334, amino acids 23-125 or amino acids 28-86 of SEQ ID NO: 335, or SEQ ID NO: 336, amino acids 23-125 or amino acids 27-89 of SEQ ID NO: 337, amino acids 24-126 or amino acids 28-90 of SEQ ID NO: 338, amino acids 22-125 or amino acids 29-85 of SEQ ID NO: 339, or SEQ ID NO: 340, amino acids 22-98 or amino acids 27-91 of SEQ ID NO: 341, SEQ ID NO: 342, or SEQ ID NO: 344, amino acids 22-102 or amino acids 27-89 of SEQ ID NO: 343, SEQ ID NO: 345, or SEQ ID NO: 346, amino acids 22-94, amino acids 28-91, or amino acids 28-77 of SEQ ID NO: 347, SEQ ID NO: 348, SEQ ID NO: 349, SEQ ID NO: 350, SEQ ID NO: 351, or SEQ ID NO: 352, amino acids 22-89 or amino acids 27-88 of SEQ ID NO: 353, SEQ ID NO: 354, SEQ ID NO: 355, SEQ ID NO: 356, SEQ ID NO: 357, SEQ ID NO: 358, or SEQ ID NO: 359, amino acids 23-109, amino acids 29-93 or amino acids 30-92 of SEQ ID NO: 360, SEQ ID NO: 361, SEQ ID NO: 362, or SEQ ID NO: 363, amino acids 22-108 or amino acids 29-88 of SEQ ID NO: 364, amino acids 35-111 or amino acids 45-97 SEQ ID NO: 365, or SEQ ID NO: 366, amino acids 223-99 or amino acids 33-85 of SEQ ID NO: 367, SEQ ID NO: 368, SEQ ID NO: 369, SEQ ID NO: 370, or SEQ ID NO: 371, amino acids 30-254, amino acids 30-205, or amino acids 32-107 of SEQ ID NO: 372, amino acids 26-252, amino acids 27-247, or amino acids 27-198 of SEQ ID NO: 373 or SEQ ID NO: 376, amino acids 25-250 or amino acids 25-200 of SEQ ID NO: 374, amino acids 27-246 or amino acids 27-201 of SEQ ID NO: 375, amino acids 147-312 or amino acids 150-252 of SEQ ID NO: 377, amino acids 145-310 or amino acids 148-250 of SEQ ID NO: 378, or amino acids 137-299 or amino acids 137-239 of SEQ ID NO: 379.

[0207] Clostridial toxins are each translated as a single-chain polypeptide of approximately 150 kDa that is subsequently cleaved by proteolytic scission within a disulfide loop by a naturally-occurring protease. This cleavage occurs within the discrete di-chain loop region created between two cysteine residues that form a disulfide bridge. This posttranslational processing yields a di-chain molecule comprising an approximately 50 kDa light chain (LC) and an approximately 100 kDa heavy chain (HC) held together by the single disulfide bond and non-covalent interactions between the two chains (FIG. 2). To facilitate recombinant production of a TVEMP, an exogenous protease cleavage site can be used to convert the single-chain polypeptide form of a TVEMP disclosed herein into the di-chain form. See, e.g., Steward, L. E. et al., Modified Clostridial Toxins with Enhanced Targeting Capabilities For Endogenous Clostridial Toxin Receptor Systems, U.S. Patent Publication No. US 2008/0096248 (Apr. 24, 2008); Steward, L. E. et al., Activatable Clostridial Toxins, U.S. Patent Publication No. US 2008/0032930 (Feb. 7, 2008); Steward, supra, (2007); Dolly, supra, (2007); Foster, supra, WO 2006/059093 (2006); and Foster, supra, WO 2006/059105 (2006), each of which is hereby incorporated by reference in its entirety.

[0208] It is envisioned that any and all protease cleavage sites can be used to convert the single-chain polypeptide form of a Clostridial toxin into the di-chain form, including, without limitation, endogenous di-chain loop protease cleavage sites and exogenous protease cleavage sites. Thus, in an aspect of the invention, a TVEMP comprises, in part, an endogenous protease cleavage site within a di-chain loop region. In another aspect of the invention, a TVEMP comprises, in part, an exogenous protease cleavage site within a di-chain loop region. As used herein, the term “di-chain loop region” means the amino acid sequence of a Clostridial toxin containing a protease cleavage site used to convert the single-chain form of a Clostridial toxin into the di-chain form. Non-limiting examples of a Clostridial toxin di-chain loop region, include, a di-chain loop region of BoNT/A comprising amino acids 430-454 of SEQ ID NO: 1; a di-chain loop region of BoNT/B comprising amino acids 437-446 of SEQ ID NO: 2; a di-chain loop region of BoNT/C1 comprising amino acids 437-453 of SEQ ID NO: 3; a di-chain loop region of BoNT/D comprising amino acids 437-450 of SEQ ID NO: 4; a di-chain loop region of BoNT/E comprising amino acids 412-426 of SEQ ID NO: 5; a di-chain loop region of BoNT/F comprising amino acids 429-445 of SEQ ID NO: 6; a di-chain loop region of BoNT/G comprising amino acids 436-450 of SEQ ID NO: 7; and a di-chain loop region of TeNT comprising amino acids 439-467 of SEQ ID NO: 8 (Table 4).

TABLE 4
Di-chain Loop Region of Clostridial Toxins

| | | Di-chain Loop Region Containing |
|---|---|---|
| | SEQ | the Naturally-occurring |
| Toxin | ID NO: | Protease Cleavage Site |
| BoNT/A | 26 | CVRGIITSKTKSLDKGYNK*----ALNDLC |
| BoNT/B | 27 | CKSVK*-------------------APGIC |
| BoNT/C1 | 28 | CHKAIDGRSLYNK*------------TLDC |
| BoNT/D | 29 | CLRLTKNSR*---------------DDSTC |
| BoNT/E | 30 | CKNIVSVKGIR*--------------KSIC |
| BoNT/F | 31 | CKSVIPRKGTK*------------APPRLC |
| BoNT/G | 32 | CKPVMYKNTGK*--------------SEQC |
| TeNT | 33 | CKKIIPPTNIRENLYNRTA*SLTDLGGELC |
| BaNT | 34 | CKS-IVSKKGTK*------------NSLC |
| BuNT | 35 | CKN-IVSVKGIR*--------------KSIC |

The amino acid sequence displayed are as follows: BoNT/A, residues 430-454 of SEQ ID NO: 1;
BoNT/B, residues 437-446 of SEQ ID NO: 2; BoNT/C1, residues 437-453 of SEQ ID NO: 3; BoNT/D,
residues 437-450 of SEQ ID NO: 4; BoNT/E, residues 412-426 of SEQ ID NO: 5; BoNT/F, residues 429-
445 of SEQ ID NO: 6; BoNT/G, residues 436-450 of SEQ ID NO: 7; TeNT, residues 439-467 of SEQ ID
NO: 8; BaNT, residues 421-435 of SEQ ID NO: 9; and BuNT, residues 412-426 of SEQ ID NO: 10. An
asterisks (*) indicates the peptide bond that is cleaved by a Clostridial toxin protease.

[0209] As used herein, the term “endogenous di-chain loop protease cleavage site” is synonymous with a “naturally occurring di-chain loop protease cleavage site” and means a naturally occurring protease cleavage site found within the di-chain loop region of a naturally occurring Clostridial toxin and includes, without limitation, naturally occurring Clostridial toxin di-chain loop protease cleavage site variants, such as, e.g., Clostridial toxin di-chain loop protease cleavage site isoforms and Clostridial toxin di-chain loop protease cleavage site subtypes. Non-limiting examples of an endogenous protease cleavage site, include, e.g., a BoNT/A di-chain loop protease cleavage site, a BoNT/B di-chain loop protease cleavage site, a BoNT/C1 di-chain loop protease cleavage site, a BoNT/D di-chain loop protease cleavage site, a BoNT/E di-chain loop protease cleavage site, a BoNT/F di-chain loop protease cleavage site, a BoNT/G di-chain loop protease cleavage site and a TeNT di-chain loop protease cleavage site.

[0210] As mentioned above, Clostridial toxins are translated as a single-chain polypeptide of approximately 150 kDa that is subsequently cleaved by proteolytic scission within a disulfide loop by a naturally-occurring protease. This posttranslational processing yields a di-chain molecule comprising an approximately 50 kDa light chain (LC) and an approximately 100 kDa heavy chain (HC) held together by a single disulphide bond and noncovalent interactions. While the identity of the protease is currently unknown, the di-chain loop protease cleavage site for many Clostridial toxins has been determined. In BoNTs, cleavage at K448-A449 converts the single polypeptide form of BoNT/A into the di-chain form; cleavage at K441-A442 converts the single polypeptide form of BoNT/B into the di-chain form; cleavage at K449-T450 converts the single polypeptide form of BoNT/C1 into the di-chain form; cleavage at R445-D446 converts the single polypeptide form of BoNT/D into the di-chain form; cleavage at R422-K423 converts the single polypeptide form of BoNT/E into the di-chain form; cleavage at K439-A440 converts the single polypeptide form of BoNT/F into the di-chain form; and cleavage at K446-S447 converts the single polypeptide form of BoNT/G into the di-chain form. Proteolytic cleavage of the single polypeptide form of TeNT at A457-S458 results in the di-chain form. Proteolytic cleavage of the single polypeptide form of BaNT at K431-N432 results in the di-chain form. Proteolytic cleavage of the single polypeptide form of BuNT at R422-K423 results in the di-chain form. Such a di-chain loop protease cleavage site is operably-linked in-frame to a TVEMP as a fusion protein. However, it should also be noted that additional cleavage sites within the di-chain loop also appear to be cleaved resulting in the generation of a small peptide fragment being lost. As a non-limiting example, BoNT/A single-chain polypeptide cleave ultimately results in the loss of a ten amino acid fragment within the di-chain loop.

[0211] Thus, in an embodiment, a protease cleavage site comprising an endogenous Clostridial toxin di-chain loop protease cleavage site is used to convert the single-chain toxin into the di-chain form. In aspects of this embodiment, conversion into the di-chain form by proteolytic cleavage occurs from a site comprising, e.g., a BoNT/A di-chain loop protease cleavage site, a BoNT/B di-chain loop protease cleavage site, a BoNT/C1 di-chain loop protease cleavage site, a BoNT/D di-chain loop protease cleavage site, a BoNT/E di-chain loop protease cleavage site, a BoNT/F di-chain loop protease cleavage site, a BoNT/G di-chain loop protease cleavage site, a TeNT di-chain loop protease cleavage site, a BaNT di-chain loop protease cleavage site, or a BuNT di-chain loop protease cleavage site.

[0212] In other aspects of this embodiment, conversion into the di-chain form by proteolytic cleavage occurs from a site comprising, e.g., a di-chain loop region of BoNT/A comprising amino acids 430-454 of SEQ ID NO: 1; a di-chain loop region of BoNT/B comprising amino acids 437-446 of SEQ ID NO: 2; a di-chain loop region of BoNT/C1 comprising amino acids 437-453 of SEQ ID NO: 3; a di-chain loop region of BoNT/D comprising amino acids 437-450 of SEQ ID NO: 4; a di-chain loop region of BoNT/E comprising amino acids 412-426 of SEQ ID NO: 5; a di-chain loop region of BoNT/F comprising amino acids 429-445 of SEQ ID NO: 6; a di-chain loop region of BoNT/G comprising amino acids 436-450 of SEQ ID NO: 7; or a di-chain loop region of TeNT comprising amino acids 439-467 of SEQ ID NO: 8. a di-chain loop region of BaNT comprising amino acids 421-435 of SEQ ID NO: 9; or a di-chain loop region of BuNT comprising amino acids 412-426 of SEQ ID NO: 10.

[0213] It is also envisioned that an exogenous protease cleavage site can be used to convert the single-chain polypeptide form of a TVEMP disclosed herein into the di-chain form. As used herein, the term “exogenous protease cleavage site” is synonymous with a “non-naturally occurring protease cleavage site” or “non-native protease cleavage site” and means a protease cleavage site that is not normally present in a di-chain loop region from a naturally occurring Clostridial toxin, with the proviso that the exogenous protease cleavage site is not a human protease cleavage site or a protease cleavage site that is susceptible to a protease being expressed in the host cell that is expressing a construct encoding an activatable polypeptide disclosed herein. It is envisioned that any and all exogenous protease cleavage sites can be used to convert the single-chain polypeptide form of a Clostridial toxin into the di-chain form are useful to practice aspects of the present invention. Non-limiting examples of exogenous protease cleavage sites include, e.g., a plant papain cleavage site, an insect papain cleavage site, a crustacian papain cleavage site, an enterokinase cleavage site, a human rhinovirus 3C protease cleavage site, a human enterovirus 3C protease cleavage site, a tobacco etch virus (TEV) protease cleavage site, a Tobacco Vein Mottling Virus (TVMV) cleavage site, a subtilisin cleavage site, a hydroxylamine cleavage site, or a Caspase 3 cleavage site.

[0214] It is envisioned that an exogenous protease cleavage site of any and all lengths can be useful in aspects of the present invention with the proviso that the exogenous protease cleavage site is capable of being cleaved by its respective protease. Thus, in aspects of this embodiment, an exogenous protease cleavage site can have a length of, e.g., at least 6, 7, 8, 9, 10, 15, 20, 25, 30, 40, 50, or at least 60 amino acids; or at most 6, 7, 8, 9, 10, 15, 20, 25, 30, 40, 50, or at least 60 amino acids.

[0215] In an embodiment, an exogenous protease cleavage site is located within the di-chain loop of a TVEMP. In aspects of this embodiment, a TVEMP comprises an exogenous protease cleavage site comprises, e.g., a plant papain cleavage site, an insect papain cleavage site, a crustacian papain cleavage site, a non-human enterokinase protease cleavage site, a Tobacco Etch Virus protease cleavage site, a Tobacco Vein Mottling Virus protease cleavage site, a human rhinovirus 3C protease cleavage site, a human enterovirus 3C protease cleavage site, a subtilisin cleavage site, a hydroxylamine cleavage site, a SUMO/ULP-1 protease cleavage site, and a non-human Caspase 3 cleavage site. In other aspects of this embodiment, an exogenous protease cleavage site is located within the di-chain loop of, e.g., a modified BoNT/A, a modified BoNT/B, a modified BoNT/C1, a modified BoNT/D, a modified BoNT/E, a modified BoNT/F, a modified BoNT/G, a modified TeNT, a modified BaNT, or a modified BuNT.

[0216] In an aspect of this embodiment, an exogenous protease cleavage site can comprise, e.g., a non-human enterokinase cleavage site is located within the di-chain loop of a TVEMP. In other aspects of the embodiment, an exogenous protease cleavage site can comprise, e.g., a bovine enterokinase protease cleavage site located within the di-chain loop of a TVEMP. In other aspects of the embodiment, an exogenous protease cleavage site can comprise, e.g., a bovine enterokinase protease cleavage site located within the di-chain loop of a TVEMP comprises SEQ ID NO: 36. In still other aspects of this embodiment, a bovine enterokinase protease cleavage site is located within the di-chain loop of, e.g., a modified BoNT/A, a modified BoNT/B, a modified BoNT/C1, a modified BoNT/D, a modified BoNT/E, a modified BoNT/F, a modified BoNT/G, a modified TeNT, a modified BaNT, or a modified BuNT.

[0217] In another aspect of this embodiment, an exogenous protease cleavage site can comprise, e.g., a Tobacco Etch Virus protease cleavage site is located within the di-chain loop of a TVEMP. In other aspects of the embodiment, an exogenous protease cleavage site can comprise, e.g., a Tobacco Etch Virus protease cleavage site located within the di-chain loop of a TVEMP comprises the consensus sequence E-P5-P4-Y-P2-Q*-G (SEQ ID NO: 377) or E-P5-P4-Y-P2-Q*-S (SEQ ID NO: 38), where P2, P4 and P5 can be any amino acid. In other aspects of the embodiment, an exogenous protease cleavage site can comprise, e.g., a Tobacco Etch Virus protease cleavage site located within the di-chain loop of a TVEMP comprises SEQ ID NO: 39, SEQ ID NO: 40, SEQ ID NO: 41, SEQ ID NO: 42, SEQ ID NO: 43, SEQ ID NO: 44, SEQ ID NO: 45, SEQ ID NO: 46, SEQ ID NO: 47 or SEQ ID NO: 48. In still other aspects of this embodiment, a Tobacco Etch Virus protease cleavage site is located within the di-chain loop of, e.g., a modified BoNT/A, a modified BoNT/B, a modified BoNT/C1, a modified BoNT/D, a modified BoNT/E, a modified BoNT/F, a modified BoNT/G, a modified TeNT, a modified BaNT, or a modified BuNT.

[0218] In another aspect of this embodiment, an exogenous protease cleavage site can comprise, e.g., a Tobacco Vein Mottling Virus protease cleavage site is located within the di-chain loop of a TVEMP. In other aspects of the embodiment, an exogenous protease cleavage site can comprise, e.g., a Tobacco Vein Mottling Virus protease cleavage site located within the di-chain loop of a TVEMP comprises the consensus sequence P6-P5-V-R-F-Q*-G (SEQ ID NO: 49) or P6-P5-V-R-F-Q*-S (SEQ ID NO: 50), where P5 and P6 can be any amino acid. In other aspects of the embodiment, an exogenous protease cleavage site can comprise, e.g., a Tobacco Vein Mottling Virus protease cleavage site located within the di-chain loop of a TVEMP comprises SEQ ID NO: 51, SEQ ID NO: 52, SEQ ID NO: 53, or SEQ ID NO: 54. In still other aspects of this embodiment, a Tobacco Vein Mottling Virus protease cleavage site is located within the di-chain loop of, e.g., a modified BoNT/A, a modified BoNT/B, a modified BoNT/C1, a modified BoNT/D, a modified BoNT/E, a modified BoNT/F, a modified BoNT/G, a modified TeNT, a modified BaNT, or a modified BuNT.

[0219] In still another aspect of this embodiment, an exogenous protease cleavage site can comprise, e.g., a human rhinovirus 3C protease cleavage site is located within the di-chain loop of a TVEMP. In other aspects of the embodiment, an exogenous protease cleavage site can comprise, e.g., a human rhinovirus 3C protease cleavage site located within the di-chain loop of a TVEMP comprises the consensus sequence P5-P4-L-F-Q*-G-P (SEQ ID NO: 55), where P4 is G, A, V, L, I, M, S or T and P5 can any amino acid, with D or E preferred. In other aspects of the embodiment, an exogenous protease cleavage site can comprise, e.g., a human rhinovirus 3C protease cleavage site located within the di-chain loop of a TVEMP comprises SEQ ID NO: 56, SEQ ID NO: 57, SEQ ID NO: 58, SEQ ID NO: 59, SEQ ID NO: 60 or SEQ ID NO: 61. In other aspects of the embodiment, an exogenous protease cleavage site can comprise, e.g., a human rhinovirus 3C protease located within the di-chain loop of a TVEMP that can be cleaved by PRESCISSION®. In still other aspects of this embodiment, a human rhinovirus 3C protease cleavage site is located within the di-chain loop of, e.g., a modified BoNT/A, a modified BoNT/B, a modified BoNT/C1, a modified BoNT/D, a modified BoNT/E, a modified BoNT/F, a modified BoNT/G, a modified TeNT, a modified BaNT, or a modified BuNT.

[0220] In yet another aspect of this embodiment, an exogenous protease cleavage site can comprise, e.g., a subtilisin cleavage site is located within the di-chain loop of a TVEMP. In other aspects of the embodiment, an exogenous protease cleavage site can comprise, e.g., a subtilisin cleavage site located within the di-chain loop of a TVEMP comprises the consensus sequence P6-P5-P4-P3-H*-Y (SEQ ID NO: 62) or P6-P5-P4-P3-Y-H* (SEQ ID NO: 63), where P3, P4 and P5 and P6 can be any amino acid. In other aspects of the embodiment, an exogenous protease cleavage site can comprise, e.g., a subtilisin cleavage site located within the di-chain loop of a TVEMP comprises SEQ ID NO: 64, SEQ ID NO: 65, or SEQ ID NO: 66. In other aspects of the embodiment, an exogenous protease cleavage site can comprise, e.g., a subtilisin cleavage site located within the di-chain loop of a TVEMP that can be cleaved by GENENASE®. In still other aspects of this embodiment, a subtilisin cleavage site is located within the di-chain loop of, e.g., a modified BoNT/A, a modified BoNT/B, a modified BoNT/C1, a modified BoNT/D, a modified BoNT/E, a modified BoNT/F, a modified BoNT/G, a modified TeNT, a modified BaNT, or a modified BuNT.

[0221] In yet another aspect of this embodiment, an exogenous protease cleavage site can comprise, e.g., a hydroxylamine cleavage site is located within the di-chain loop of a TVEMP. In other aspects of the embodiment, an exogenous protease cleavage site can comprise, e.g., a hydroxylamine cleavage site comprising multiples of the dipeptide N*G. In other aspects of the embodiment, an exogenous protease cleavage site can comprise, e.g., a hydroxylamine cleavage site located within the di-chain loop of a TVEMP comprises SEQ ID NO: 67, or SEQ ID NO: 68. In still other aspects of this embodiment, a hydroxylamine cleavage site is located within the di-chain loop of, e.g., a modified BoNT/A, a modified BoNT/B, a modified BoNT/C1, a modified BoNT/D, a modified BoNT/E, a modified BoNT/F, a modified BoNT/G, a modified TeNT, a modified BaNT, or a modified BuNT.

[0222] In yet another aspect of this embodiment, an exogenous protease cleavage site can comprise, e.g., a SUMO/ULP-1 protease cleavage site is located within the di-chain loop of a TVEMP. In other aspects of the embodiment, an exogenous protease cleavage site can comprise, e.g., a SUMO/ULP-1 protease cleavage site located within the di-chain loop of a TVEMP comprising the consensus sequence G-G*-P1′-P2′-P3′ (SEQ ID NO: 69), where P1′, P2′, and P3′ can be any amino acid. In other aspects of the embodiment, an exogenous protease cleavage site can comprise, e.g., a SUMO/ULP-1 protease cleavage site located within the di-chain loop of a TVEMP comprises SEQ ID NO: 70. In still other aspects of this embodiment, a SUMO/ULP-1 protease cleavage site is located within the di-chain loop of, e.g., a modified BoNT/A, a modified BoNT/B, a modified BoNT/C1, a modified BoNT/D, a modified BoNT/E, a modified BoNT/F, a modified BoNT/G, a modified TeNT, a modified BaNT, or a modified BuNT.

[0223] In an aspect of this embodiment, an exogenous protease cleavage site can comprise, e.g., a non-human Caspase 3 cleavage site is located within the di-chain loop of a TVEMP. In other aspects of the embodiment, an exogenous protease cleavage site can comprise, e.g., a mouse Caspase 3 protease cleavage site located within the di-chain loop of a TVEMP. In other aspects of the embodiment, an exogenous protease cleavage site can comprise, e.g., a non-human Caspase 3 protease cleavage site located within the di-chain loop of a TVEMP comprises the consensus sequence D-P3-P2-D*P1′ (SEQ ID NO: 71), where P3 can be any amino acid, with E preferred, P2 can be any amino acid and P1′ can any amino acid, with G or S preferred. In other aspects of the embodiment, an exogenous protease cleavage site can comprise, e.g., a non-human Caspase 3 protease cleavage site located within the di-chain loop of a TVEMP comprising SEQ ID NO: 72, SEQ ID NO: 73, SEQ ID NO: 74, SEQ ID NO: 75, SEQ ID NO: 76, or SEQ ID NO: 77. In still other aspects of this embodiment, a bovine enterokinase protease cleavage site is located within the di-chain loop of, e.g., a modified BoNT/A, a modified BoNT/B, a modified BoNT/C1, a modified BoNT/D, a modified BoNT/E, a modified BoNT/F, a modified BoNT/G, a modified TeNT, a modified BaNT, or a modified BuNT.

[0224] A di-chain loop region is modified to replace a naturally-occurring di-chain loop protease cleavage site for an exogenous protease cleavage site. In this modification, the naturally-occurring di-chain loop protease cleavage site is made inoperable and thus can not be cleaved by its protease. Only the exogenous protease cleavage site can be cleaved by its corresponding exogenous protease. In this type of modification, the exogenous protease site is operably-linked in-frame to a TVEMP as a fusion protein and the site can be cleaved by its respective exogenous protease. Replacement of an endogenous di-chain loop protease cleavage site with an exogenous protease cleavage site can be a substitution of the sites where the exogenous site is engineered at the position approximating the cleavage site location of the endogenous site. Replacement of an endogenous di-chain loop protease cleavage site with an exogenous protease cleavage site can be an addition of an exogenous site where the exogenous site is engineered at the position different from the cleavage site location of the endogenous site, the endogenous site being engineered to be inoperable. The location and kind of protease cleavage site may be critical because certain targeting domains require a free amino-terminal or carboxyl-terminal amino acid. For example, when a targeting domain is placed between two other domains, e.g., see FIG. 4, a criterion for selection of a protease cleavage site could be whether the protease that cleaves its site leaves a flush cut, exposing the free amino-terminal or carboxyl-terminal of the targeting domain necessary for selective binding of the targeting domain to its receptor.

[0225] A naturally-occurring protease cleavage site can be made inoperable by altering at least one of the two amino acids flanking the peptide bond cleaved by the naturally-occurring di-chain loop protease. More extensive alterations can be made, with the proviso that the two cysteine residues of the di-chain loop region remain intact and the region can still form the disulfide bridge. Non-limiting examples of an amino acid alteration include deletion of an amino acid or replacement of the original amino acid with a different amino acid. Thus, in one embodiment, a naturally-occurring protease cleavage site is made inoperable by altering at least 1, 2, 3, 4, 5, 6, 7, 8, 9, 10, 15, 20 amino acids including at least one of the two amino acids flanking the peptide bond cleaved by a naturally-occurring protease. In another embodiment, a naturally-occurring protease cleavage site is made inoperable by altering at most 1, 2, 3, 4, 5, 6, 7, 8, 9, 10, 15, 20 amino acids including at least one of the two amino acids flanking the peptide bond cleaved by a naturally-occurring protease.

[0226] It is understood that a TVEMP disclosed herein can optionally further comprise a flexible region comprising a flexible spacer. A flexible region comprising flexible spacers can be used to adjust the length of a polypeptide region in order to optimize a characteristic, attribute or property of a polypeptide. As a non-limiting example, a polypeptide region comprising one or more flexible spacers in tandem can be use to better expose a protease cleavage site thereby facilitating cleavage of that site by a protease. As another non-limiting example, a polypeptide region comprising one or more flexible spacers in tandem can be use to better present a targeting domain, thereby facilitating the binding of that targeting domain to its receptor.

[0227] A flexible space comprising a peptide is at least one amino acid in length and comprises non-charged amino acids with small side-chain R groups, such as, e.g., glycine, alanine, valine, leucine or serine. Thus, in an embodiment a flexible spacer can have a length of, e.g., at least 1, 2, 3, 4, 5, 6, 7, 8, 9, or 10 amino acids; or at most 1, 2, 3, 4, 5, 6, 7, 8, 9, or 10 amino acids. In still another embodiment, a flexible spacer can be, e.g., between 1-3 amino acids, between 2-4 amino acids, between 3-5 amino acids, between 4-6 amino acids, or between 5-7 amino acids. Non-limiting examples of a flexible spacer include, e.g., a G-spacers such as GGG, GGGG (SEQ ID NO: 78), and GGGGS (SEQ ID NO: 79) or an A-spacers such as AAA, AAAA (SEQ ID NO: 80) and AAAAV (SEQ ID NO: 81). Such a flexible region is operably-linked in-frame to the TVEMP as a fusion protein.

[0228] Thus, in an embodiment, a TVEMP disclosed herein can further comprise a flexible region comprising a flexible spacer. In another embodiment, a TVEMP disclosed herein can further comprise flexible region comprising a plurality of flexible spacers in tandem. In aspects of this embodiment, a flexible region can comprise in tandem, e.g., at least 1, 2, 3, 4, or 5 G-spacers; or at most 1, 2, 3, 4, or 5 G-spacers. In still other aspects of this embodiment, a flexible region can comprise in tandem, e.g., at least 1, 2, 3, 4, or 5 A-spacers; or at most 1, 2, 3, 4, or 5 A-spacers. In another aspect of this embodiment, a TVEMP can comprise a flexible region comprising one or more copies of the same flexible spacers, one or more copies of different flexible-spacer regions, or any combination thereof.

[0229] In other aspects of this embodiment, a TVEMP comprising a flexible spacer can be, e.g., a modified BoNT/A, a modified BoNT/B, a modified BoNT/C1, a modified BoNT/D, a modified BoNT/E, a modified BoNT/F, a modified BoNT/G, a modified TeNT, a modified BaNT, or a modified BuNT.

[0230] It is envisioned that a TVEMP disclosed herein can comprise a flexible spacer in any and all locations with the proviso that TVEMP is capable of performing the intoxication process. In aspects of this embodiment, a flexible spacer is positioned between, e.g., an enzymatic domain and a translocation domain, an enzymatic domain and a targeting domain, an enzymatic domain and an exogenous protease cleavage site. In other aspects of this embodiment, a G-spacer is positioned between, e.g., an enzymatic domain and a translocation domain, an enzymatic domain and a targeting domain, an enzymatic domain and an exogenous protease cleavage site. In other aspects of this embodiment, an A-spacer is positioned between, e.g., an enzymatic domain and a translocation domain, an enzymatic domain and a targeting domain, an enzymatic domain and an exogenous protease cleavage site.

[0231] In other aspects of this embodiment, a flexible spacer is positioned between, e.g., a targeting domain and a translocation domain, a targeting domain and an enzymatic domain, a targeting domain and an exogenous protease cleavage site. In other aspects of this embodiment, a G-spacer is positioned between, e.g., a targeting domain and a translocation domain, a targeting domain and an enzymatic domain, a targeting domain and an exogenous protease cleavage site. In other aspects of this embodiment, an A-spacer is positioned between, e.g., a targeting domain and a translocation domain, a targeting domain and an enzymatic domain, a targeting domain and an exogenous protease cleavage site.

[0232] In yet other aspects of this embodiment, a flexible spacer is positioned between, e.g., a translocation domain and an enzymatic domain, a translocation domain and a targeting domain, a translocation domain and an exogenous protease cleavage site. In other aspects of this embodiment, a G-spacer is positioned between, e.g., a translocation domain and an enzymatic domain, a translocation domain and a targeting domain, a translocation domain and an exogenous protease cleavage site. In other aspects of this embodiment, an A-spacer is positioned between, e.g., a translocation domain and an enzymatic domain, a translocation domain and a targeting domain, a translocation domain and an exogenous protease cleavage site.

[0233] It is envisioned that a TVEMP disclosed herein can comprise a targeting domain in any and all locations with the proviso that TVEMP is capable of performing the intoxication process. Non-limiting examples include, locating a targeting domain at the amino terminus of a TVEMP; locating a targeting domain between a Clostridial toxin enzymatic domain and a translocation domain of a TVEMP; and locating a targeting domain at the carboxyl terminus of a TVEMP. Other non-limiting examples include, locating a targeting domain between a Clostridial toxin enzymatic domain and a Clostridial toxin translocation domain of a TVEMP. The enzymatic domain of naturally-occurring Clostridial toxins contains the native start methionine. Thus, in domain organizations where the enzymatic domain is not in the amino-terminal location an amino acid sequence comprising the start methionine should be placed in front of the amino-terminal domain. Likewise, where a targeting domain is in the amino-terminal position, an amino acid sequence comprising a start methionine and a protease cleavage site may be operably-linked in situations in which a targeting domain requires a free amino terminus, see, e.g., Shengwen Li et al., Degradable Clostridial Toxins, U.S. patent application Ser. No. 11/572,512 (Jan. 23, 2007), which is hereby incorporated by reference in its entirety. In addition, it is known in the art that when adding a polypeptide that is operably-linked to the amino terminus of another polypeptide comprising the start methionine that the original methionine residue can be deleted.

[0234] Thus, in an embodiment, a TVEMP can comprise an amino to carboxyl single polypeptide linear order comprising a targeting domain, a translocation domain, an exogenous protease cleavage site and an enzymatic domain (FIG. 3A). In an aspect of this embodiment, a TVEMP can comprise an amino to carboxyl single polypeptide linear order comprising a targeting domain, a Clostridial toxin translocation domain, an exogenous protease cleavage site and a Clostridial toxin enzymatic domain.

[0235] In another embodiment, a TVEMP can comprise an amino to carboxyl single polypeptide linear order comprising a targeting domain, an enzymatic domain, an exogenous protease cleavage site, and a translocation domain (FIG. 3B). In an aspect of this embodiment, a TVEMP can comprise an amino to carboxyl single polypeptide linear order comprising a targeting domain, a Clostridial toxin enzymatic domain, an exogenous protease cleavage site, a Clostridial toxin translocation domain.

[0236] In yet another embodiment, a TVEMP can comprise an amino to carboxyl single polypeptide linear order comprising an enzymatic domain, an exogenous protease cleavage site, a targeting domain, and a translocation domain (FIG. 4A). In an aspect of this embodiment, a TVEMP can comprise an amino to carboxyl single polypeptide linear order comprising a Clostridial toxin enzymatic domain, an exogenous protease cleavage site, a targeting domain, and a Clostridial toxin translocation domain.

[0237] In yet another embodiment, a TVEMP can comprise an amino to carboxyl single polypeptide linear order comprising a translocation domain, an exogenous protease cleavage site, a targeting domain, and an enzymatic domain (FIG. 4B). In an aspect of this embodiment, a TVEMP can comprise an amino to carboxyl single polypeptide linear order comprising a Clostridial toxin translocation domain, a targeting domain, an exogenous protease cleavage site and a Clostridial toxin enzymatic domain.

[0238] In another embodiment, a TVEMP can comprise an amino to carboxyl single polypeptide linear order comprising an enzymatic domain, a targeting domain, an exogenous protease cleavage site, and a translocation domain (FIG. 4C). In an aspect of this embodiment, a TVEMP can comprise an amino to carboxyl single polypeptide linear order comprising a Clostridial toxin enzymatic domain, a targeting domain, an exogenous protease cleavage site, a Clostridial toxin translocation domain.

[0239] In yet another embodiment, a TVEMP can comprise an amino to carboxyl single polypeptide linear order comprising a translocation domain, a targeting domain, an exogenous protease cleavage site and an enzymatic domain (FIG. 4D). In an aspect of this embodiment, a TVEMP can comprise an amino to carboxyl single polypeptide linear order comprising a Clostridial toxin translocation domain, a targeting domain, an exogenous protease cleavage site and a Clostridial toxin enzymatic domain.

[0240] In still another embodiment, a TVEMP can comprise an amino to carboxyl single polypeptide linear order comprising an enzymatic domain, an exogenous protease cleavage site, a translocation domain, and a targeting domain (FIG. 5A). In an aspect of this embodiment, a TVEMP can comprise an amino to carboxyl single polypeptide linear order comprising a Clostridial toxin enzymatic domain, an exogenous protease cleavage site, a Clostridial toxin translocation domain, and a targeting domain.

[0241] In still another embodiment, a TVEMP can comprise an amino to carboxyl single polypeptide linear order comprising a translocation domain, an exogenous protease cleavage site, an enzymatic domain and a targeting domain, (FIG. 5B). In an aspect of this embodiment, a TVEMP can comprise an amino to carboxyl single polypeptide linear order comprising a Clostridial toxin translocation domain, a targeting domain, an exogenous protease cleavage site and a Clostridial toxin enzymatic domain.

[0242] A composition useful in the invention generally is administered as a pharmaceutical acceptable composition comprising a TVEMP. As used herein, the term “pharmaceutically acceptable” means any molecular entity or composition that does not produce an adverse, allergic or other untoward or unwanted reaction when administered to an individual. As used herein, the term “pharmaceutically acceptable composition” is synonymous with “pharmaceutical composition” and means a therapeutically effective concentration of an active ingredient, such as, e.g., any of the TVEMPs disclosed herein. A pharmaceutical composition comprising a TVEMP is useful for medical and veterinary applications. A pharmaceutical composition may be administered to a patient alone, or in combination with other supplementary active ingredients, agents, drugs or hormones. The pharmaceutical compositions may be manufactured using any of a variety of processes, including, without limitation, conventional mixing, dissolving, granulating, dragee-making, levigating, emulsifying, encapsulating, entrapping, and lyophilizing. The pharmaceutical composition can take any of a variety of forms including, without limitation, a sterile solution, suspension, emulsion, lyophilizate, tablet, pill, pellet, capsule, powder, syrup, elixir or any other dosage form suitable for administration.

[0243] Aspects of the present invention provide, in part, a composition comprising a TVEMP. It is envisioned that any of the composition disclosed herein can be useful in a method of treating neurogenic inflammation in a mammal in need thereof, with the proviso that the composition prevents or reduces a symptom associated with neurogenic inflammation. Non-limiting examples of compositions comprising a TVEMP include a TVEMP comprising a targeting domain, a Clostridial toxin translocation domain and a Clostridial toxin enzymatic domain. It is envisioned that any TVEMP disclosed herein can be used, including those disclosed in, e.g., Steward, supra, (2007); Dolly, supra, (2007); Foster, supra, WO 2006/059093 (2006); Foster, supra, WO 2006/059105 (Jun. 8, 2006). It is also understood that the two or more different TVEMPs can be provided as separate compositions or as part of a single composition.

[0244] It is also envisioned that a pharmaceutical composition comprising a TVEMP can optionally include a pharmaceutically acceptable carriers that facilitate processing of an active ingredient into pharmaceutically acceptable compositions. As used herein, the term “pharmacologically acceptable carrier” is synonymous with “pharmacological carrier” and means any carrier that has substantially no long term or permanent detrimental effect when administered and encompasses terms such as “pharmacologically acceptable vehicle, stabilizer, diluent, additive, auxiliary or excipient.” Such a carrier generally is mixed with an active compound, or permitted to dilute or enclose the active compound and can be a solid, semi-solid, or liquid agent. It is understood that the active ingredients can be soluble or can be delivered as a suspension in the desired carrier or diluent. Any of a variety of pharmaceutically acceptable carriers can be used including, without limitation, aqueous media such as, e.g., water, saline, glycine, hyaluronic acid and the like; solid carriers such as, e.g., mannitol, lactose, starch, magnesium stearate, sodium saccharin, talcum, cellulose, glucose, sucrose, magnesium carbonate, and the like; solvents; dispersion media; coatings; antibacterial and antifungal agents; isotonic and absorption delaying agents; or any other inactive ingredient. Selection of a pharmacologically acceptable carrier can depend on the mode of administration. Except insofar as any pharmacologically acceptable carrier is incompatible with the active ingredient, its use in pharmaceutically acceptable compositions is contemplated. Non-limiting examples of specific uses of such pharmaceutical carriers can be found in PHARMACEUTICAL DOSAGE FORMS AND DRUG DELIVERY SYSTEMS (Howard C. Ansel et al., eds., Lippincott Williams & Wilkins Publishers, 7^{th} ed. 1999); REMINGTON: THE SCIENCE AND PRACTICE OF PHARMACY (Alfonso R. Gennaro ed., Lippincott, Williams & Wilkins, 20^{th} ed. 2000); GOODMAN & GILMAN′S THE PHARMACOLOGICAL BASIS OF THERAPEUTICS (Joel G. Hardman et al., eds., McGraw-Hill Professional, 10^{th} ed. 2001); and HANDBOOK OF PHARMACEUTICAL EXCIPIENTS (Raymond C. Rowe et al., APhA Publications, 4^{th} edition 2003). These protocols are routine procedures and any modifications are well within the scope of one skilled in the art and from the teaching herein.

[0245] It is further envisioned that a pharmaceutical composition disclosed herein can optionally include, without limitation, other pharmaceutically acceptable components (or pharmaceutical components), including, without limitation, buffers, preservatives, tonicity adjusters, salts, antioxidants, osmolality adjusting agents, physiological substances, pharmacological substances, bulking agents, emulsifying agents, wetting agents, sweetening or flavoring agents, and the like. Various buffers and means for adjusting pH can be used to prepare a pharmaceutical composition disclosed herein, provided that the resulting preparation is pharmaceutically acceptable. Such buffers include, without limitation, acetate buffers, citrate buffers, phosphate buffers, neutral buffered saline, phosphate buffered saline and borate buffers. It is understood that acids or bases can be used to adjust the pH of a composition as needed. Pharmaceutically acceptable antioxidants include, without limitation, sodium metabisulfite, sodium thiosulfate, acetylcysteine, butylated hydroxyanisole and butylated hydroxytoluene. Useful preservatives include, without limitation, benzalkonium chloride, chlorobutanol, thimerosal, phenylmercuric acetate, phenylmercuric nitrate, a stabilized oxy chloro composition and chelants, such as, e.g., DTPA or DTPA-bisamide, calcium DTPA, and CaNaDTPA-bisamide. Tonicity adjustors useful in a pharmaceutical composition include, without limitation, salts such as, e.g., sodium chloride, potassium chloride, mannitol or glycerin and other pharmaceutically acceptable tonicity adjustor. The pharmaceutical composition may be provided as a salt and can be formed with many acids, including but not limited to, hydrochloric, sulfuric, acetic, lactic, tartaric, malic, succinic, etc. Salts tend to be more soluble in aqueous or other protonic solvents than are the corresponding free base forms. It is understood that these and other substances known in the art of pharmacology can be included in a pharmaceutical composition.

[0246] In an embodiment, a composition comprising a TVEMP is a pharmaceutical composition comprising a TVEMP. In aspects of this embodiment, a pharmaceutical composition comprising a TVEMP further comprises a pharmacological carrier, a pharmaceutical component, or both a pharmacological carrier and a pharmaceutical component. In other aspects of this embodiment, a pharmaceutical composition comprising a TVEMP further comprises at least one pharmacological carrier, at least one pharmaceutical component, or at least one pharmacological carrier and at least one pharmaceutical component.

[0247] Aspects of the present invention provide, in part, a disease or disorder associated with aberrant new blood vessel formation. As used herein, the term “disease or disorder associated with aberrant new blood vessel formation” means any disease or disorder where a pathophysiology effect is aberrant new blood vessel formation. A disease or disorder associated with aberrant new blood vessel formation includes, without limitation, a retinopathy (like diabetic retinopathy), a macula degeneration (like a wet or dry macula degeneration), a choroidal neovascularization, an atherosclerosis, a coronary atherosclerotic plaque formation, an endometriosis, an idiopathic pulmonary fibrosis, chronic inflammatory/fibroproliferative disorder, a rheumatoid arthritis, a psoriasis, or a cancer. As used herein, the term “aberrant new blood vessel formation” means the formation of new blood vessels in response to a pathophysiology condition. Aberrant new blood vessel formation can be a result of angiogenesis (sprouting or splitting) or vasculogenesis. It is envisioned that the TVEMPs, compositions and methods disclosed herein can be useful to treat any disease or disorder associated with aberrant new blood vessel formation wherein the target cell is expressing the cognate receptor for the targeting domain present in the TVEMP.

[0248] Aspects of the present invention provide, in part, reducing a symptom associated with aberrant new blood vessel formation. In an aspect, the symptom reduced is an increase in the growth rate of endothelial cells, endothelial progenitor cells, tip cells, stalk cells, phalanx cells, mural cells, pericytes, and/or macrophages. In another aspect, the symptom reduced is an increase in the cell division rate of endothelial cells, endothelial progenitor cells, tip cells, stalk cells, phalanx cells, mural cells, pericytes, and/or macrophages. In yet another aspect, the symptom reduced is an increase in the extent of migration of endothelial cells, endothelial progenitor cells, tip cells, stalk cells, phalanx cells, mural cells, pericytes, and/or macrophages into the stroma. In still another aspect, the symptom reduced is an increase in angiogenesis. In a further aspect, the symptom reduced is an increase in vasculogenesis. In a yet further aspect, the symptom reduced is a decrease in apoptosis of endothelial cells, endothelial progenitor cells, tip cells, stalk cells, phalanx cells, mural cells, pericytes, and/or macrophages. In a still further aspect, the symptom reduced is a decrease in cell death or cell necrosis of endothelial cells, endothelial progenitor cells, tip cells, stalk cells, phalanx cells, mural cells, pericytes, and/or macrophages. Thus, a TVEMP treatment will decrease the growth rate of endothelial cells, endothelial progenitor cells, tip cells, stalk cells, phalanx cells, mural cells, pericytes, and/or macrophages, decrease the cell division rate of endothelial cells, endothelial progenitor cells, tip cells, stalk cells, phalanx cells, mural cells, pericytes, and/or macrophages, decrease the extent of migration of endothelial cells, endothelial progenitor cells, tip cells, stalk cells, phalanx cells, mural cells, pericytes, and/or macrophages into adjacent areas, decrease angiogenesis, decrease vasculogenesis, increase apoptosis of endothelial cells, endothelial progenitor cells, tip cells, stalk cells, phalanx cells, mural cells, pericytes, and/or macrophages, and/or increase cell death and/or cell necrosis of endothelial cells, endothelial progenitor cells, tip cells, stalk cells, phalanx cells, mural cells, pericytes, and/or macrophages.

[0249] Aspects of the present invention provide, in part, a mammal. A mammal includes a human, and a human can be a patient. Other aspects of the present invention provide, in part, an individual. An individual includes a human, and a human can be a patient.

[0250] Aspects of the present invention provide, in part, administering a composition comprising a TVEMP. As used herein, the term “administering” means any delivery mechanism that provides a composition comprising a TVEMP to a patient that potentially results in a clinically, therapeutically, or experimentally beneficial result. A TVEMP can be delivered to a patient using a cellular uptake approach where a TVEMP is delivered intracellular or a gene therapy approach where a TVEMP is express derived from precursor RNAs expressed from an expression vectors.

[0251] A composition comprising a TVEMP as disclosed herein can be administered to a mammal using a cellular uptake approach. Administration of a composition comprising a TVEMP using a cellular uptake approach comprise a variety of enteral or parenteral approaches including, without limitation, oral administration in any acceptable form, such as, e.g., tablet, liquid, capsule, powder, or the like; topical administration in any acceptable form, such as, e.g., drops, spray, creams, gels or ointments; intravascular administration in any acceptable form, such as, e.g., intravenous bolus injection, intravenous infusion, intra-arterial bolus injection, intra-arterial infusion and catheter instillation into the vasculature; peri- and intra-tissue administration in any acceptable form, such as, e.g., intraperitoneal injection, intramuscular injection, subcutaneous injection, subcutaneous infusion, intraocular injection, retinal injection, or sub-retinal injection or epidural injection; intravesicular administration in any acceptable form, such as, e.g., catheter instillation; and by placement device, such as, e.g., an implant, a patch, a pellet, a catheter, an osmotic pump, a suppository, a bioerodible delivery system, a non-bioerodible delivery system or another implanted extended or slow release system. An exemplary list of biodegradable polymers and methods of use are described in, e.g., Handbook of Biodegradable Polymers (Abraham J. Domb et al., eds., Overseas Publishers Association, 1997).

[0252] A composition comprising a TVEMP can be administered to a mammal by a variety of methods known to those of skill in the art, including, but not restricted to, encapsulation in liposomes, by ionophoresis, or by incorporation into other vehicles, such as hydrogels, cyclodextrins, biodegradable nanocapsules, and bioadhesive microspheres, or by proteinaceous vectors. Delivery mechanisms for administering a composition comprising a TVEMP to a patient are described in, e.g., Leonid Beigelman et al., Compositions for the Delivery of Negatively Charged Molecules, U.S. Pat. No. 6,395,713; and Achim Aigner, Delivery Systems for the Direct Application of siRNAs to Induce RNA Interference (RNAi) in vivo, 2006(716559) J. Biomed. Biotech. 1-15 (2006); Controlled Drug Delivery: Designing Technologies for the Future (Kinam Park & Randy J. Mrsny eds., American Chemical Association, 2000); Vernon G. Wong & Mae W. L. Hu, Methods for Treating Inflammation-mediated Conditions of the Eye, U.S. Pat. No. 6,726,918; David A. Weber et al., Methods and Apparatus for Delivery of Ocular Implants, U.S. Patent Publication No. US2004/0054374; Thierry Nivaggioli et al., Biodegradable Ocular Implant, U.S. Patent Publication No. US2004/0137059; Patrick M. Hughes et al., Anti-Angiogenic Sustained Release Intraocular Implants and Related Methods, U.S. patent application Ser. No. 11/364,687; and Patrick M. Hughes et al., Sustained Release Intraocular Drug Delivery Systems, U.S. Patent Publication 2006/0182783, each of which is hereby incorporated by reference in its entirety.

[0253] A composition comprising a TVEMP as disclosed herein can also be administered to a patient using a gene therapy approach by expressing a TVEMP within in a cell involved in the aberrant formation of new blood vessels. A TVEMP can be expressed from nucleic acid molecules operably-linked to an expression vector, see, e.g., P. D. Good et al., Expression of Small, Therapeutic RNAs in Human Cell Nuclei, 4(1) Gene Ther. 45-54 (1997); James D. Thompson, Polymerase III-based expression of therapeutic RNAs, U.S. Pat. No. 6,852,535 (Feb. 8, 2005); Maciej Wiznerowicz et al., Tuning Silence: Conditional Systems for RNA Interference, 3(9) Nat. Methods 682-688m (2006); Ola Snøve and John J. Rossi, Expressing Short Hairpin RNAi in vivo, 3(9) Nat. Methods 689-698 (2006); and Charles X. Li et al., Delivery of RNA Interference, 5(18) Cell Cycle 2103-2109 (2006). A person of ordinary skill in the art would realize that any TVEMP can be expressed in eukaryotic cells using an appropriate expression vector.

[0254] Expression vectors capable of expressing a TVEMP can provide persistent or stable expression of the TVEMP in a cell involved in the aberrant formation of new blood vessels. Alternatively, expression vectors capable of expressing a TVEMP can provide for transient expression of the TVEMP in a cell involved in the aberrant formation of new blood vessels. Such transiently expressing vectors can be repeatedly administered as necessary. A TVEMP-expressing vectors can be administered by a delivery mechanism and route of administration discussed above, by administration to target cells ex-planted from a patient followed by reintroduction into the patient, or by any other means that would allow for introduction into the desired target cell, see, e.g., Larry A. Couture and Dan T. Stinchcomb, Anti-gene Therapy: The Use of Ribozymes to Inhibit Gene Function, 12(12) Trends Genet. 510-515 (1996).

[0255] The actual delivery mechanism used to administer a composition comprising a TVEMP to a mammal can be determined by a person of ordinary skill in the art by taking into account factors, including, without limitation, the type of aberrant new blood vessel formation, the location of the aberrant new blood vessel formation, the cause of the aberrant new blood vessel formation, the severity of the aberrant new blood vessel formation, the degree of relief desired, the duration of relief desired, the particular TVEMP used, the rate of excretion of the TVEMP used, the pharmacodynamics of the TVEMP used, the nature of the other compounds to be included in the composition, the particular route of administration, the particular characteristics, history and risk factors of the patient, such as, e.g., age, weight, general health and the like, or any combination thereof.

[0256] In an embodiment, a composition comprising a TVEMP is administered to the site to be treated by injection. In aspects of this embodiment, injection of a composition comprising a TVEMP is by, e.g., intramuscular injection, intraorgan injection, subdermal injection, dermal injection, or injection into any other body area for the effective administration of a composition comprising a TVEMP. In aspects of this embodiment, injection of a composition comprising a TVEMP is a region of a disease or disorder associated with aberrant new blood vessel formation or into the area surrounding such a region.

[0257] A composition comprising a TVEMP can be administered to a mammal using a variety of routes. Routes of administration suitable for a method of treating a disease or disorder associated with aberrant new blood vessel formation as disclosed herein include both local and systemic administration. Local administration results in significantly more delivery of a composition to a specific location as compared to the entire body of the mammal, whereas, systemic administration results in delivery of a composition to essentially the entire body of the patient. Routes of administration suitable for a method of treating a disease or disorder associated with aberrant new blood vessel as disclosed herein also include both central and peripheral administration. Central administration results in delivery of a composition to essentially the central nervous system of the patient and includes, e.g., intrathecal administration, epidural administration as well as a cranial injection or implant. Peripheral administration results in delivery of a composition to essentially any area of a patient outside of the central nervous system and encompasses any route of administration other than direct administration to the spine or brain. The actual route of administration of a composition comprising a TVEMP used in a mammal can be determined by a person of ordinary skill in the art by taking into account factors, including, without limitation, the type of aberrant new blood vessel, the location of the aberrant new blood vessel, the cause of the associated with aberrant new blood vessel, the severity of the aberrant new blood vessel, the degree of relief desired, the duration of relief desired, the particular TVEMP used, the rate of excretion of the TVEMP used, the pharmacodynamics of the TVEMP used, the nature of the other compounds to be included in the composition, the particular route of administration, the particular characteristics, history and risk factors of the mammal, such as, e.g., age, weight, general health and the like, or any combination thereof.

[0258] In an embodiment, a composition comprising a TVEMP is administered systemically to a mammal. In another embodiment, a composition comprising a TVEMP is administered locally to a mammal. In an aspect of this embodiment, a composition comprising a TVEMP is administered to a disease or disorder associated with aberrant new blood vessel formation of a mammal. In another aspect of this embodiment, a composition comprising a TVEMP is administered to the area surrounding a disease or disorder associated with aberrant new blood vessel formation of a mammal.

[0259] Aspects of the present invention provide, in part, administering a therapeutically effective amount of a composition comprising a TVEMP. As used herein, the term “therapeutically effective amount” is synonymous with “therapeutically effective dose” and when used in reference to treating a disease or disorder associated with aberrant new blood vessel formation means the minimum dose of a TVEMP necessary to achieve the desired therapeutic effect and includes a dose sufficient to reduce or inhibit aberrant new blood vessel formation. In aspects of this embodiment, a therapeutically effective amount of a composition comprising a TVEMP reduces or inhibits aberrant new blood vessel formation by, e.g., at least 10%, at least 20%, at least 30%, at least 40%, at least 50%, at least 60%, at least 70%, at least 80%, at least 90% or at least 100%. In other aspects of this embodiment, a therapeutically effective amount of a composition comprising a TVEMP reduces or inhibits aberrant new blood vessel formation by, e.g., at most 10%, at most 20%, at most 30%, at most 40%, at most 50%, at most 60%, at most 70%, at most 80%, at most 90% or at most 100%. In yet other aspects of this embodiment, a therapeutically effective amount of a composition comprising a TVEMP reduces or inhibits aberrant new blood vessel formation by, e.g., about 10% to about 100%, about 10% to about 90%, about 10% to about 80%, about 10% to about 70%, about 10% to about 60%, about 10% to about 50%, about 10% to about 40%, about 20% to about 100%, about 20% to about 90%, about 20% to about 80%, about 20% to about 20%, about 20% to about 60%, about 20% to about 50%, about 20% to about 40%, about 30% to about 100%, about 30% to about 90%, about 30% to about 80%, about 30% to about 70%, about 30% to about 60%, or about 30% to about 50%. In still other aspects of this embodiment, a therapeutically effective amount of the TVEMP is the dosage sufficient to reduce or inhibit aberrant new blood vessel formation for, e.g., at least one week, at least one month, at least two months, at least three months, at least four months, at least five months, at least six months, at least seven months, at least eight months, at least nine months, at least ten months, at least eleven months, or at least twelve months.

[0260] The actual therapeutically effective amount of a composition comprising a TVEMP to be administered to a mammal can be determined by a person of ordinary skill in the art by taking into account factors, including, without limitation, the type of aberrant new blood vessel formation, the location of the aberrant new blood vessel formation, the cause of the aberrant new blood vessel formation, the severity of the aberrant new blood vessel formation, the degree of relief desired, the duration of relief desired, the particular TVEMP used, the rate of excretion of the TVEMP used, the pharmacodynamics of the TVEMP used, the nature of the other compounds to be included in the composition, the particular route of administration, the particular characteristics, history and risk factors of the patient, such as, e.g., age, weight, general health and the like, or any combination thereof. Additionally, where repeated administration of a composition comprising a TVEMP is used, the actual effect amount of a composition comprising a TVEMP will further depend upon factors, including, without limitation, the frequency of administration, the half-life of the composition comprising a TVEMP, or any combination thereof. It is known by a person of ordinary skill in the art that an effective amount of a composition comprising a TVEMP can be extrapolated from in vitro assays and in vivo administration studies using animal models prior to administration to humans. Wide variations in the necessary effective amount are to be expected in view of the differing efficiencies of the various routes of administration. For instance, oral administration generally would be expected to require higher dosage levels than administration by intravenous or intravitreal injection. Variations in these dosage levels can be adjusted using standard empirical routines of optimization, which are well-known to a person of ordinary skill in the art. The precise therapeutically effective dosage levels and patterns are preferably determined by the attending physician in consideration of the above-identified factors.

[0261] As a non-limiting example, when administering a composition comprising a TVEMP to a mammal, a therapeutically effective amount generally is in the range of about 1 fg to about 3.0 mg. In aspects of this embodiment, an effective amount of a composition comprising a TVEMP can be, e.g., about 100 fg to about 3.0 mg, about 100 pg to about 3.0 mg, about 100 μg to about 3.0 mg, or about 100 pg to about 3.0 mg. In other aspects of this embodiment, an effective amount of a composition comprising a TVEMP can be, e.g., about 100 fg to about 750 μg, about 100 pg to about 750 μg, about 100 ng to about 750 μg, or about 1 μg to about 750 μg. In yet other aspects of this embodiment, a therapeutically effective amount of a composition comprising a TVEMP can be, e.g., at least 1 fg, at least 250 fg, at least 500 fg, at least 750 fg, at least 1 pg, at least 250 pg, at least 500 pg, at least 750 pg, at least 1 ng, at least 250 ng, at least 500 ng, at least 750 ng, at least 1 μg, at least 250 μg, at least 500 μg, at least 750 μg, or at least 1 mg. In still other aspects of this embodiment, a therapeutically effective amount of a composition comprising a TVEMP can be, e.g., at most 1 fg, at most 250 fg, at most 500 fg, at most 750 fg, at most 1 pg, at most 250 pg, at most 500 pg, at most 750 pg, at most 1 ng, at most 250 ng, at most 500 ng, at most 750 ng, at most 1 μg, at least 250 μg, at most 500 μg, at most 750 μg, or at most 1 mg.

[0262] As another non-limiting example, when administering a composition comprising a TVEMP to a mammal, a therapeutically effective amount generally is in the range of about 0.00001 mg/kg to about 3.0 mg/kg. In aspects of this embodiment, an effective amount of a composition comprising a TVEMP can be, e.g., about 0.0001 mg/kg to about 0.001 mg/kg, about 0.03 mg/kg to about 3.0 mg/kg, about 0.1 mg/kg to about 3.0 mg/kg, or about 0.3 mg/kg to about 3.0 mg/kg. In yet other aspects of this embodiment, a therapeutically effective amount of a composition comprising a TVEMP can be, e.g., at least 0.00001 mg/kg, at least 0.0001 mg/kg, at least 0.001 mg/kg, at least 0.01 mg/kg, at least 0.1 mg/kg, or at least 1 mg/kg. In yet other aspects of this embodiment, a therapeutically effective amount of a composition comprising a TVEMP can be, e.g., at most 0.00001 mg/kg, at most 0.0001 mg/kg, at most 0.001 mg/kg, at most 0.01 mg/kg, at most 0.1 mg/kg, or at most 1 mg/kg.

[0263] Dosing can be single dosage or cumulative (serial dosing), and can be readily determined by one skilled in the art. For instance, treatment of a disease or disorder associated with aberrant new blood vessel formation may comprise a one-time administration of an effective dose of a composition comprising a TVEMP. As a non-limiting example, an effective dose of a composition comprising a TVEMP can be administered once to a patient, e.g., as a single injection or deposition at or near the site exhibiting a symptom of aberrant new blood vessel formation. Alternatively, treatment of a cancer may comprise multiple administrations of an effective dose of a composition comprising a TVEMP carried out over a range of time periods, such as, e.g., daily, once every few days, weekly, monthly or yearly. As a non-limiting example, a composition comprising a TVEMP can be administered once or twice yearly to a mammal. The timing of administration can vary from mammal to mammal, depending upon such factors as the severity of a mammal's symptoms. For example, an effective dose of a composition comprising a TVEMP can be administered to a mammal once every three months for an indefinite period of time, or until the patient no longer requires therapy. A person of ordinary skill in the art will recognize that the condition of the mammal can be monitored throughout the course of treatment and that the effective amount of a composition comprising a TVEMP that is administered can be adjusted accordingly.

[0264] A composition comprising a TVEMP as disclosed herein can also be administered to a mammal in combination with other therapeutic compounds to increase the overall therapeutic effect of the treatment. The use of multiple compounds to treat an indication can increase the beneficial effects while reducing the presence of side effects.

[0265] Aspects of the present invention can also be described as follows:
[0266] 1. A TVEMP comprising a targeting domain, a Clostridial toxin translocation domain and a Clostridial toxin enzymatic domain.
[0267] 2. A TVEMP comprising a targeting domain, a Clostridial toxin translocation domain and a Clostridial toxin enzymatic domain, and an exogenous protease cleavage site.
[0268] 3. The TVEMP of embodiment 1, wherein the TVEMP comprises a linear amino-to-carboxyl single polypeptide order of 1) the Clostridial toxin enzymatic domain, the exogenous protease cleavage site, the Clostridial toxin translocation domain, the targeting domain, 2) the Clostridial toxin enzymatic domain, the exogenous protease cleavage site, the targeting domain, the Clostridial toxin translocation domain, 3) the targeting domain, the Clostridial toxin translocation domain, the exogenous protease cleavage site and the Clostridial toxin enzymatic domain, 4) the targeting domain, the Clostridial toxin enzymatic domain, the exogenous protease cleavage site, the Clostridial toxin translocation domain, 5) the Clostridial toxin translocation domain, the exogenous protease cleavage site, the Clostridial toxin enzymatic domain and the targeting domain, or 6) the Clostridial toxin translocation domain, the exogenous protease cleavage site, the targeting domain and the Clostridial toxin enzymatic domain.
[0269] 4. The TVEMP of embodiment 2, wherein the TVEMP comprises a linear amino-to-carboxyl single polypeptide order of 1) the Clostridial toxin enzymatic domain, the exogenous protease cleavage site, the Clostridial toxin translocation domain, the targeting domain, 2) the Clostridial toxin enzymatic domain, the exogenous protease cleavage site, the targeting domain, the Clostridial toxin translocation domain, 3) the targeting domain, the Clostridial toxin translocation domain, the exogenous protease cleavage site and the Clostridial toxin enzymatic domain, 4) the targeting domain, the Clostridial toxin enzymatic domain, the exogenous protease cleavage site, the Clostridial toxin translocation domain, 5) the Clostridial toxin translocation domain, the exogenous protease cleavage site, the Clostridial toxin enzymatic domain and the targeting domain, or 6) the Clostridial toxin translocation domain, the exogenous protease cleavage site, the targeting domain and the Clostridial toxin enzymatic domain.
[0270] 5. The TVEMP of embodiments 1-4, wherein the targeting domain is an apelin targeting domain, an anthrax protective antigen (APA) targeting domain, an angiogenic factor with G patch and FHA domain 1 (AGGF1) targeting domain, an angiopoietin targeting domain, an angiostatin targeting domain, an angiogenin targeting domain, an endothelin targeting domain, an endothelial cell-specific molecule (ECSM) targeting domain, an ephrin targeting domain, an erythropoietin targeting domain, a hepatocyte growth factor (HGF) targeting domain, a netrin targeting domain, a brain specific angiogenesis inhibitor (BSAI) targeting domain, a Delta-like (DII) targeting domain, a jagged targeting domain, a semaphorin (Sema) targeting domain, a thrombospondin targeting domain, a chondromodulin targeting domain, a 16 kDa prolactin fragment targeting domain, a granulocyte macrophage-colony stimulating factor (GM-CSF) targeting domain, an Interferon-α (IFN-α) targeting domain, a pigment epithelium-derived factor (PEDF) targeting domain, a troponin targeting domain, a Vasohibin (VASH) targeting domain, a Urocortin (Ucn) targeting domain, a C-motif cytokine ligand targeting domain, a C—C-motif cytokine ligand targeting domain, a C—X—C-motif cytokine ligand targeting domain, and an endothelial-monocyte activating polypeptide (EMAP) targeting domain.
[0271] 6. The TVEMP of embodiment 5, wherein the apelin targeting domain comprises amino acids 42-77 of SEQ ID NO: 82, SEQ ID NO: 83, SEQ ID NO: 84, SEQ ID NO: 85, SEQ ID NO: 86, SEQ ID NO: 87, SEQ ID NO: 88; the APA targeting domain comprises amino acids 30-764, amino acids 30-287, amino acids 30-196, amino acids 47-178, amino acids 204-628, amino acids 288-516, amino acids 517-624, amino acids 625-764 of SEQ ID NO: 89; or the AGGF1 targeting domain comprises amino acids 410-516 of SEQ ID NO: 90, amino acids 95-201 of SEQ ID NO: 91, amino acids 406-512 of SEQ ID NO: 92, amino acids 410-516 of SEQ ID NO: 93, amino acids 408-514 of SEQ ID NO: 94, amino acids 420-513 of SEQ ID NO: 95, amino acids 414-507 of SEQ ID NO: 96, amino acids 407-512 of SEQ ID NO: 97, or amino acids 469-574 of SEQ ID NO: 98.
[0272] 7. The TVEMP of embodiment 5, wherein the angiopoietin targeting domain include an angiopoietin-1 targeting domain, an angiopoietin-2 targeting domain, an angiopoietin-3 targeting domain, or an angiopoietin-4 targeting domain.
[0273] 8. The TVEMP of embodiment 7, wherein the angiopoietin targeting domain comprises amino acids 280-495 or amino acids 282-496 of SEQ ID NO: 99, SEQ ID NO: 100, or SEQ ID NO: 101; amino acids 280-492 or amino acids 281-493 of SEQ ID NO: 102, SEQ ID NO: 103, or SEQ ID NO: 104; amino acids 286-501, amino acids 239-451, or amino acids 292-507 of SEQ ID NO: 105, SEQ ID NO: 106, or SEQ ID NO: 107; or amino acids 286-501 or amino acids 292-507 of SEQ ID NO: 108 or SEQ ID NO: 109.
[0274] 9. The TVEMP of embodiment 5, wherein the angiostatin targeting domain comprises amino acids 1-182, amino acids 1-262, amino acids 1-349, or amino acids 1-455 of SEQ ID NO: 110 or SEQ ID NO: 111; or the angiogenin targeting domain including amino acids 25-145 or amino acids 29-140 of SEQ ID NO: 112, SEQ ID NO: 113, SEQ ID NO: 114, SEQ ID NO: 115, or SEQ ID NO: 116.
[0275] 10. The TVEMP of embodiment 5, wherein the endothelin targeting domain is an endothelin-1 targeting domain, an endothelin-2 targeting domain or an endothelin-3 targeting domain.
[0276] 11. The TVEMP of embodiment 5, wherein the endothelin targeting domain including amino acids 53-73, amino acids 60-78, or amino acids 109-129 of SEQ ID NO: 117, SEQ ID NO: 118, SEQ ID NO: 119, SEQ ID NO: 120, SEQ ID NO: 121, or SEQ ID NO: 122, amino acids 49-69 or amino acids 96-111 of SEQ ID NO: 123 or SEQ ID NO: 124, amino acids 48-68 or amino acids 95-110 of SEQ ID NO: 125, amino acids 46-66 or amino acids 93-108 of SEQ ID NO: 126, amino acids 47-67 or amino acids 94-109 of SEQ ID NO: 127, amino acids 43-63 or amino acids 90-105 of SEQ ID NO: 128, amino acids 97-117 or amino acids 159-173 of SEQ ID NO: 129, SEQ ID NO: 130, SEQ ID NO: 131, or SEQ ID NO: 136, amino acids 85-114 or amino acids 150-171 of SEQ ID NO: 132, SEQ ID NO: 133, SEQ ID NO: 134, amino acids 83-103 or amino acids 144-158 of SEQ ID NO: 135, amino acids 53-73 or amino acids 115-135 of SEQ ID NO: 137, or amino acids 8-33 of SEQ ID NO 138; or the ECSM targeting domain including amino acids 22-184, amino acids 26-100, amino acids 46-100, or amino acids 72-146 of SEQ ID NO: 139, SEQ ID NO: 140, SEQ ID NO: 141, SEQ ID NO: 142, SEQ ID NO: 144, SEQ ID NO: 145, SEQ ID NO: 146, SEQ ID NO: 147; or amino acids 22-229 or amino acids 72-146 of SEQ ID NO: 143.
[0277] 12. The TVEMP of embodiment 5, wherein the ephrin targeting domain comprises an ephrin-A1 targeting domain or an ephrin-B2 targeting domain.
[0278] 13. The TVEMP of embodiment 12, wherein the ephrin targeting domain comprises amino acids 17-152 or amino acids 17-136 of SEQ ID NO: 148, SEQ ID NO: 149, SEQ ID NO: 150, or SEQ ID NO: 151; amino acids 34-170 of SEQ ID NO: 152 or SEQ ID NO: 153; or amino acids 30-170 of SEQ ID NO: 154.
[0279] 14. The TVEMP of embodiment 5, wherein the erythropoietin targeting domain comprises amino acids 33-193 of SEQ ID NO: 155, or amino acids 26-192 of SEQ ID NO: 156 or SEQ ID NO: 157.
[0280] 15. The TVEMP of embodiment 5, wherein the HGF targeting domain comprises a HGF targeting domain, a NK1 targeting domain, a NK2 targeting domain, a NK3 targeting domain, or a NK4 targeting domain.
[0281] 16. The TVEMP of embodiment 15, wherein the HGF targeting domain comprises SEQ ID NO: 158, SEQ ID NO: 159, SEQ ID NO: 160, SEQ ID NO: 161, SEQ ID NO: 162, SEQ ID NO: 163, SEQ ID NO: 164, SEQ ID NO: 165, SEQ ID NO: 166, SEQ ID NO: 167, SEQ ID NO: 168, SEQ ID NO: 169, SEQ ID NO: 171, or SEQ ID NO: 172.
[0282] 17. The TVEMP of embodiment 5, wherein the netrin targeting domain is a netrin-1 targeting domain, a netrin-2 targeting domain, a netrin-3 targeting domain, a netrin-4 targeting domain, a netrin-5 targeting domain, a netrin-G1 targeting domain, and a netrin-G2 targeting domain.
[0283] 18. The TVEMP of embodiment 17, wherein the netrin targeting domain comprises amino acids 26-604; 46-283, amino acids 285-328, amino acids 341-390, amino acids 403-451, or amino acids 487-601 of SEQ ID NO: 173, SEQ ID NO: 174, SEQ ID NO: 177, amino acids 26-603, amino acids 45-282, amino acids 284-327, amino acids 340-389, or amino acids 486-600 of SEQ ID NO: 175, amino acids 25-600, amino acids 46-283, amino acids 285-328, amino acids 403-451, or amino acids 487-598 of SEQ ID NO: 176, amino acids 26-605, amino acids 46-283, amino acids 285-328, amino acids 341-390, amino acids 403-451, or amino acids 487-601 of SEQ ID NO: 178, amino acids 26-606, amino acids 47-285, amino acids 287-330, amino acids 343-392, amino acids 405-453, or amino acids 489-603 of SEQ ID NO: 179; amino acids 34-253, amino acids 254-299, amino acids 373-422, or amino acids 456-562 of SEQ ID NO: 180, amino acids 15-581, amino acids 33-306, amino acids 262-305, amino acids 318-387, amino acids 380-428, or amino acids 464-563 of SEQ ID NO: 181; amino acids 28-580, amino acids 34-253, amino acids 254-299, amino acids 373-422, or amino acids 456-562 of SEQ ID NO: 182, SEQ ID NO: 183, SEQ ID NO: 184, or SEQ ID NO: 185; amino acids 19-628, amino acids 29-260, amino acids 262-321, amino acids 332-385, amino acids 395-445, or amino acids 516-626 of SEQ ID NO: 186 or SEQ ID NO: 189, amino acids 19-627, amino acids 29-260, amino acids 261-320, amino acids 332-392, amino acids 395-445, or amino acids 515-625 of SEQ ID NO: 187, amino acids 19-637, amino acids 37-269, amino acids 270-329, amino acids 341-396, amino acids 404-454, amino acids 525-635 of SEQ ID NO: 188, amino acids 19-630, amino acids 28-260, amino acids 261-320, amino acids 332-385, amino acids 394-445, amino acids 395-446, amino acids 517-626 of SEQ ID NO: 190, amino acids 19-778, amino acids 128-410, amino acids 412-470, amino acids 481-537, amino acids 545-595, amino acids 666-776 of SEQ ID NO: 191; amino acids 17-489, amino acids 211-265, amino acids 274-323, amino acids 360-475 of SEQ ID NO: 192 and SEQ ID NO: 193, amino acids 17-452, amino acids 172-216, amino acids 234-276, or amino acids 313-438 of SEQ ID NO: 194, amino acids 17-456, amino acids 172-216, amino acids 234-276, or amino acids 313-442 of SEQ ID NO: 195; amino acids 29-539, amino acids 29-510, amino acids 71-295, amino acids 297-341, or amino acids 420-467 of SEQ ID NO: 196, amino acids 29-480, amino acids 71-295, or amino acids 297-341 of SEQ ID NO: 197, amino acids 29-438, amino acids 71-295, or amino acids 297-341 of SEQ ID NO: 198, amino acids 76-123 of SEQ ID NO: 199, amino acids 20-55 of SEQ ID NO: 200, amino acids 118-153 of SEQ ID NO: 205, amino acids 41-77 of SEQ ID NO: 206, amino acids 62-97 of SEQ ID NO: 207, amino acids 19-510, amino acids 71-295, amino acids 276-341, or amino acids 420-455 of SEQ ID NO: 208, amino acids 19-483, amino acids 71-295, amino acids 297-341, or amino acids 364-411 of SEQ ID NO: 209, amino acids 19-438, amino acids 71-295, amino acids 297-341, or amino acids 364-411 of SEQ ID NO: 210, amino acids 19-480, amino acids 71-295, amino acids 297-341, or amino acids 364-411 of SEQ ID NO: 211, amino acids 19-460, amino acids 71-295, amino acids 297-341, or amino acids 364-411 of SEQ ID NO: 212, amino acids 19-364, amino acids 71-295, or amino acids 297-341 of SEQ ID NO: 213; amino acids 18-530, amino acids 18-507, amino acids 60-285, or amino acids 408-446 of SEQ ID NO: 214, SEQ ID NO: 215, or SEQ ID NO: 216.
[0284] 19. The TVEMP of embodiment 5, wherein the DII targeting domain comprises a Delta-like-1 targeting domain, a Delta-like-2 targeting domain, or a Delta-like-3 targeting domain and the jagged targeting domain comprises a jagged-1 targeting domain or a jagged-2 targeting domain.
[0285] 20. The TVEMP of embodiment 19, wherein the DII targeting domain comprises amino acids 159-221 of SEQ ID NO: 219 or SEQ ID NO: 220, amino acids 158-220 of SEQ ID NO: 221 or SEQ ID NO: 222, amino acids 47-618, amino acids 47-587, or amino acids 33-585 of SEQ ID NO: 223, SEQ ID NO: 224, SEQ ID NO: 225, or SEQ ID NO: 226, amino acids 27-685 or amino acids 155-217 of SEQ ID NO: 228, amino acids 27-686 or amino acids 156-218 of SEQ ID NO: 229; or the jagged targeting domain comprises amino acids 34-1218 or amino acids 167-229 of SEQ ID NO: 230, SEQ ID NO: 231, SEQ ID NO: 232, or SEQ ID NO: 233, 27-1200 or amino acids 178-240 of SEQ ID NO: 234, SEQ ID NO: 235, or SEQ ID NO: 237, or amino acids 37-99 or SEQ ID NO: 236.
[0286] 21. The TVEMP of embodiment 5, wherein the Sema targeting domain comprises a semaphoring-3A targeting domain, a semaphoring-3F targeting domain, a semaphoring-4D targeting domain, or a semaphoring-5A targeting domain.
[0287] 22. The TVEMP of embodiment 21, wherein the Sema targeting domain comprises amino acids 22-771, amino acids 57-498, amino acids 517-552, or amino acids 581-670 of SEQ ID NO: 238, SEQ ID NO: 239, amino acids 19-785, amino acids 57-529, amino acids 548-584, or amino acids 609-697 of SEQ ID NO: 240, amino acids, 57-498, amino acids 517-553, amino acids 517-553, or amino acids 578-666 of SEQ ID NO: 241, amino acids 22-862, amino acids 50-482, amino acids 503-554, or amino acids 559-637 of SEQ ID NO: 242, amino acids 22-738, amino acids 50-482, amino acids 503-549, or amino acids 600-679 of SEQ ID NO: 243, amino acids 24-861, amino acids 50-482, amino acids 503-550, amino acids 559-646 of SEQ ID NO: 244, amino acids, 23-1074, amino acids 58-468 or amino acids 486-533 of SEQ ID NO: 245, SEQ ID NO: 246.
[0288] 23. The TVEMP of embodiment 5, wherein the thrombospondin targeting domain comprises a thrombospondin-1 targeting domain or a thrombospondin-2 targeting domain or the BSAI targeting domain comprises a BSAI-1 targeting domain and a BSAI-2 targeting domain.
[0289] 24. The TVEMP of embodiment 5, wherein the thrombospondin targeting domain comprises amino acids 19-1170 of SEQ ID NO: 247, SEQ ID NO: 248, SEQ ID NO: 249, or SEQ ID NO: 250; or the BSAI targeting domain comprises amino acids 31-1584, amino acids 31-930, amino acids 359-520, amino acids 412-575, amino acids 264-314, amino acids 359-407, amino acids 412-462, amino acids 486-520, amino acids 525-575, amino acids 577-643, amino acids 653-875, or amino acids 880-938 of SEQ ID NO: 217, amino acids 21-1549, amino acids 21-920, amino acids 305-519, amino acids 413-586, amino acids 305-353, amino acids 413-463, amino acids 469-519, amino acids 522-586, or amino acids 597-857 of SEQ ID NO: 218.
[0290] 25. The TVEMP of embodiment 5, wherein the chondromodulin targeting domain comprises amino acids 214-334 of SEQ ID NO: 251 or SEQ ID NO: 253, or amino acids 215-335 of SEQ ID NO: 252 or the 16 kDa prolactin fragment targeting domain comprises SEQ ID NO: 254.
[0291] 26. The TVEMP of embodiment 5, wherein the GM-CSF targeting domain comprises amino acids 18-144, amino acids 18-138, or amino acids 27-138 of SEQ ID NO: 255, SEQ ID NO: 256, SEQ ID NO: 258, SEQ ID NO: 260, or SEQ ID NO: 261, amino acids 18-143, amino acids 18-137, or amino acids 30-137 of SEQ ID NO: 257, amino acids 18-141, amino acids 18-135, or amino acids 31-135 of SEQ ID NO: 259.
[0292] 27. The TVEMP of embodiment 5, wherein the IFN-α targeting domain comprises amino acids 24-189 or amino acids 26-178 of SEQ ID NO: 262, SEQ ID NO: 263, SEQ ID NO: 264, SEQ ID NO: 265, SEQ ID NO: 266, SEQ ID NO: 267, SEQ ID NO: 268, SEQ ID NO: 269, or SEQ ID NO: 270.
[0293] 28. The TVEMP of embodiment 5, wherein the PEDF targeting domain comprises amino acids 20-418 or amino acids 40-415 of SEQ ID NO: 271, amino acids 20-417 or amino acids 38-410 of SEQ ID NO: 272, or amino acids 20-417 or amino acids 39-414 of SEQ ID NO: 273.
[0294] 29. The TVEMP of embodiment 5, wherein the troponin targeting domain comprises amino acids 15-132 or amino acids 28-131 of SEQ ID NO: 274, SEQ ID NO: 275, or SEQ ID NO: 276.
[0295] 30. The TVEMP of embodiment 5, wherein the VASH targeting domain including amino acids 319-365 of SEQ ID NO: 277 or SEQ ID NO: 278, or amino acids 329-375 of SEQ ID NO: 279; or the Ucn targeting domain including amino acids 20-112 or amino acids 72-109 of SEQ ID NO: 284 or SEQ ID NO: 285, or amino acids 21-123 or amino acids 83-119 of SEQ ID NO: 286.
[0296] 31. The TVEMP of embodiment 5, wherein the CL targeting domain is a lymphotactin targeting domain.
[0297] 32. The TVEMP of embodiment 31, wherein the CL targeting domain comprises amino acids 22-114, amino acids 22-93, or amino acids 30-93 of SEQ ID NO: 287, SEQ ID NO: 288, SEQ ID NO: 291, or SEQ ID NO: 292, amino acids 22-110, amino acids 22-88, or amino acids 26-83 of SEQ ID NO: 290, amino acids 22-97, amino acids 22-89, or amino acids 26-89 of SEQ ID NO: 293.
[0298] 33. The TVEMP of embodiment 5, wherein the CCL targeting domain a CCL1 targeting domain and a CCL2 targeting domain.
[0299] 34. The TVEMP of embodiment 33, wherein the CCL targeting domain comprises amino acids 24-96, amino acids 33-89, or amino acids 34-62 SEQ ID NO: 294 or SEQ ID NO: 295, or amino acids 24-148, amino acids 34-91, or amino acids 24-85 SEQ ID NO: 296 or SEQ ID NO: 297.
[0300] 35. The TVEMP of embodiment 5, wherein the CXCL targeting domain a CXCL1 targeting domain, a CXCL2 targeting domain, a CXCL3 targeting domain, a CXCL4 targeting domain, a CXCL5 targeting domain, a CXCL6 targeting domain, a CXCL7 targeting domain, a CXCL8 targeting domain, a CXCL9 targeting domain, a CXCL10 targeting domain, a CXCL11 targeting domain, a CXCL12 targeting domain, a CXCL13 targeting domain, a CXCL14 targeting domain, a CXCL16 targeting domain, and an endothelial-monocyte activating polypeptide II (EMAP II) targeting domain.
[0301] 36. The TVEMP of embodiment 35, wherein the CXCL targeting domain comprises amino acids 35-107 or amino acids 40-102 of SEQ ID NO: 298, SEQ ID NO: 299, SEQ ID NO: 303, SEQ ID NO: 304, SEQ ID NO: 306, SEQ ID NO: 309, or SEQ ID NO: 310, amino acids 31-104 or amino acids 37-99 of SEQ ID NO: 300, or SEQ ID NO: 305, amino acids 24-96 or amino acids 30-92 of SEQ ID NO: 301, SEQ ID NO: 302, or SEQ ID NO: 312, amino acids 30-100 or amino acids 33-95 of SEQ ID NO: 307 or SEQ ID NO: 308, amino acids 30-100 or amino acids 33-87 of SEQ ID NO: 311, amino acids 32-101 or amino acids 38-100 of SEQ ID NO: 313, amino acids 22-83 or amino acids 22-71 of SEQ ID NO: 314 or SEQ ID NO: 315, amino acids 30-105, amino acids, 33-104 or amino acids 41-77 of SEQ ID NO: 317, amino acids 37-114 or amino acids 46-107 of SEQ ID NO: 318, or SEQ ID NO: 319, amino acids 35-112 or amino acids 45-106 of SEQ ID NO: 320, amino acids 41-132 or amino acids 50-11 of SEQ ID NO: 321, amino acids 38-130 or amino acids 47-109 of SEQ ID NO: 322, amino acids 38-114 or amino acids 46-107 of SEQ ID NO: 323, or SEQ ID NO: 324, amino acids 37-112 or amino acids 45-106 of SEQ ID NO: 325, amino acids 35-128, amino acids 44-128, amino acids 44-124 or amino acids 60-120 of SEQ ID NO: 326, amino acids 40-119 or amino acids 51-113 of SEQ ID NO: 327, amino acids 34-113 or amino acids 49-111 of SEQ ID NO: 328, amino acids 32-111 or amino acids 47-109 of SEQ ID NO: 329, amino acids 21-99 or amino acids 31-94 of SEQ ID NO: 330, SEQ ID NO: 331, or SEQ ID NO: 333, amino acids 23-101 or amino acids 31-84 of SEQ ID NO: 332, amino acids 17-103 or amino acids 30-93 SEQ ID NO: 334, amino acids 23-125 or amino acids 28-86 of SEQ ID NO: 335, or SEQ ID NO: 336, amino acids 23-125 or amino acids 27-89 of SEQ ID NO: 337, amino acids 24-126 or amino acids 28-90 of SEQ ID NO: 338, amino acids 22-125 or amino acids 29-85 of SEQ ID NO: 339, or SEQ ID NO: 340, amino acids 22-98 or amino acids 27-91 of SEQ ID NO: 341, SEQ ID NO: 342, or SEQ ID NO: 344, amino acids 22-102 or amino acids 27-89 of SEQ ID NO: 343, SEQ ID NO: 345, or SEQ ID NO: 346, amino acids 22-94, amino acids 28-91, or amino acids 28-77 of SEQ ID NO: 347, SEQ ID NO: 348, SEQ ID NO: 349, SEQ ID NO: 350, SEQ ID NO: 351, or SEQ ID NO: 352, amino acids 22-89 or amino acids 27-88 of SEQ ID NO: 353, SEQ ID NO: 354, SEQ ID NO: 355, SEQ ID NO: 356, SEQ ID NO: 357, SEQ ID NO: 358, or SEQ ID NO: 359, amino acids 23-109, amino acids 29-93 or amino acids 30-92 of SEQ ID NO: 360, SEQ ID NO: 361, SEQ ID NO: 362, or SEQ ID NO: 363, amino acids 22-108 or amino acids 29-88 of SEQ ID NO: 364, amino acids 35-111 or amino acids 45-97 SEQ ID NO: 365, or SEQ ID NO: 366, amino acids 223-99 or amino acids 33-85 of SEQ ID NO: 367, SEQ ID NO: 368, SEQ ID NO: 369, SEQ ID NO: 370, or SEQ ID NO: 371, amino acids 30-254, amino acids 30-205, or amino acids 32-107 of SEQ ID NO: 372, amino acids 26-252, amino acids 27-247, or amino acids 27-198 of SEQ ID NO: 373 or SEQ ID NO: 376, amino acids 25-250 or amino acids 25-200 of SEQ ID NO: 374, amino acids 27-246 or amino acids 27-201 of SEQ ID NO: 375, amino acids 147-312 or amino acids 150-252 of SEQ ID NO: 377, amino acids 145-310 or amino acids 148-250 of SEQ ID NO: 378, or amino acids 137-299 or amino acids 137-239 of SEQ ID NO: 379.
[0302] 37. The TVEMP of embodiments 1-36, wherein the Clostridial toxin translocation domain is a BoNT/A translocation domain, a BoNT/B translocation domain, a BoNT/C1 translocation domain, a BoNT/D translocation domain, a BoNT/E translocation domain, a BoNT/F translocation domain, a BoNT/G translocation domain, a TeNT translocation domain, a BaNT translocation domain, or a BuNT translocation domain.
[0303] 38. The TVEMP of embodiments 1-37, wherein the Clostridial toxin enzymatic domain is a BoNT/A enzymatic domain, a BoNT/B enzymatic domain, a BoNT/C1 enzymatic domain, a BoNT/D enzymatic domain, a BoNT/E enzymatic domain, a BoNT/F enzymatic domain, a BoNT/G enzymatic domain, a TeNT enzymatic domain, a BaNT enzymatic domain, or a BuNT enzymatic domain.
[0304] 39. The TVEMP of embodiments 2 and 4-38, wherein the exogenous protease cleavage site is a plant papain cleavage site, an insect papain cleavage site, a crustacian papain cleavage site, an enterokinase cleavage site, a human rhinovirus 3C protease cleavage site, a human enterovirus 3C protease cleavage site, a tobacco etch virus protease cleavage site, a Tobacco Vein Mottling Virus cleavage site, a subtilisin cleavage site, a hydroxylamine cleavage site, or a Caspase 3 cleavage site.
[0305] 40. A composition comprising a TVEMP of 1-39.
[0306] 41. The composition of 40, wherein the composition is a pharmaceutical composition.
[0307] 42. The composition of 41, wherein the pharmaceutical composition comprises a pharmaceutical carrier, pharmaceutical excipient, or any combination thereof.
[0308] 43. A use of a TVEMP of embodiments 1-42 in the manufacturing a medicament for treating a disease or disorder associated with aberrant new blood vessel formation in a mammal in need thereof.
[0309] 44. A method of a disease or disorder associated with aberrant new blood vessel formation in a mammal, the method comprising the step of administering to the mammal in need thereof a therapeutically effective amount of a composition including a TVEMP of embodiments 1-43, wherein administration of the composition reduces a symptom of a disease or disorder associated with aberrant new blood vessel formation.
[0310] 45. A use of a TVEMP for the treatment of a disease or disorder associated with aberrant new blood vessel formation in a mammal in need thereof, the use comprising the step of administering to the mammal a therapeutically effective amount of a composition including a TVEMP of embodiments 1-43, wherein administration of the TVEMP reduces a symptom of a disease or disorder associated with aberrant new blood vessel formation.
[0311] 46. The method of embodiment 44 or use of embodiment 45, wherein the disease or disorder associated with aberrant new blood vessel formation is a retinopathy, a macula degeneration, a choroidal neovascularization, an atherosclerosis, a coronary atherosclerotic plaque formation, an endometriosis, an idiopathic pulmonary fibrosis, chronic inflammatory/fibroproliferative disorder, a rheumatoid arthritis, a psoriasis, or a cancer.

### EXAMPLES

[0312] The following examples illustrate representative embodiments now contemplated, but should not be construed to limit the disclosed TVEMPs, compositions including TVEMPs, and methods of treating cancer using such compositions.

### Example 1

### Light Chain Assays

[0313] This example illustrates how to screen target cells in order to determine which Clostridial toxin light chain had an effect sufficient to provide a therapeutic benefit in a disease treatment.

[0314] To identify which Clostridial toxin light chain or active fragment thereof was useful in making a TVEMP for treating a target cell using a method disclosed herein, a Clostridial toxin light chain cleavage assay was conducted. These assays address two fundamental issues. First, the light chains of the various botulinum neurotoxin serotypes cleave different SNARE substrates. In addition, some cells may only express SNAP-23 which is not cleavable by naturally-occurring botulinum neurotoxins. These cells would not be sensitive to LC/A, but may be sensitive to LC/B and LC/C1 if they express synaptobrevin-2 (VAMP-2) and/or Syntaxin, respectively. Second, this transfection assay allows the examination of the cellular effects of the light chains on target cells in a way that is independent of receptor binding and translocation into the cell. Taken together, this assay allows the examination of the effects of cleaving SNARE proteins on a variety of target cell lines encompassing several types of human diseases.

[0315] Mammalian expression constructs encoding a fusion protein comprising a green fluorescent protein (GFP) linked to a light chain of different botulinum neurotoxin serotypes were made using standard procedures. These expression constructs were designated 1) pQBI25/GFP, a construct expressing GFP of SEQ ID NO: 201 encoded by the polynucleotide of SEQ ID NO: 202; 2) pQBI25/GFP-LC/A, a construct expressing GFP-LC/A fusion protein of SEQ ID NO: 203 encoded by the polynucleotide of SEQ ID NO: 204; 3) pQBI/GFP-LC/B, a construct expressing GFP-LC/B fusion protein of SEQ ID NO: 205 encoded by the polynucleotide of SEQ ID NO: 206; 4) pQBI/GFP-LC/C1, a construct expressing GFP-LC/C1 fusion protein of SEQ ID NO: 207 encoded by the polynucleotide of SEQ ID NO: 208; and 5) pQBI/GFP-LC/E, a construct expressing GFP-LC/E fusion protein of SEQ ID NO: 209 encoded by the polynucleotide of SEQ ID NO: 210. The light chains for these particular botulinum toxin serotypes were selected because overall, the light chains cleave one of the three predominant SNARE proteins SNAP-25, VAMP, or Syntaxin.

[0316] To culture cells, an appropriate density of cells were plated into the wells of 6-well tissue culture plates containing 3 mL of an appropriate medium (Table 5). The cells were grown in a 37° C. incubator under 5% carbon dioxide until cells reached the appropriate density (about 1×10⁶ cells). A 500 μL transfection solution was prepared by adding 250 μL of OPTI-MEM Reduced Serum Medium containing 10 μL of LipofectAmine 2000 (Invitrogen Inc., Carlsbad, Calif.), incubated at room temperature for 5 minutes, to 250 μL of OPTI-MEM Reduced Serum Medium containing 5 μg of the desired mammalian expression construct. This transfection mixture was incubated at room temperature for approximately 25 minutes. The growth media was replaced with fresh unsupplemented serum-free media and the 500 μL transfection solution was added to the cells. The cells were then incubated in a 37° C. incubator under 5% carbon dioxide for approximately 8 hours. The transfection media was replaced with fresh unsupplemented serum-free media and the cells then incubated in a 37° C. incubator under 5% carbon dioxide for approximately 48 hours. After this incubation, the cells were washed by aspirating the media and rinsing each well with 3 mL of 1×PBS.

TABLE 5
Cell Lines and Media

| Cell Line | Origin | Source | Serum Growth Media Composition |
|---|---|---|---|
| RT4 | Human urinary | ATCC HTB-2 | McCoy's 5a media with 10% fetal bovine |
| | bladder transitional | | serum, 100 U/mL Penicillin, and 100 μg/mL |
| | cell carcinoma | | Streptomycin |
| P19 | Mouse embryonic | ATCC CRL-1825 | Alpha Minimal Essential Medium media |
| | carcinoma | | with 7.5% bovine calf serum, 2.5% fetal |
| | | | bovine calf serum, 100 U/mL Penicillin, and |
| | | | 100 μg/mL Streptomycin |
| NCI H69 | Human small lung | ATCC HTB-119 | RPMI-1640 media with 10% fetal bovine |
| | carcinoma | | serum, 100 U/mL Penicillin, and 100 μg/mL |
| | | | Streptomycin |
| NCI H82 | Human small lung | ATCC HTB-175 | RPMI-1640 media with 10% fetal bovine |
| | carcinoma | | serum, 100 U/mL Penicillin, and 100 μg/mL |
| | | | Streptomycin |
| DU-145 | Human prostate | ATCC HTB-81 | Eagle's Minimum Essential Medium with 10% |
| | carcinoma derived | | fetal bovine serum, 100 U/mL Penicillin, |
| | from brain | | and 100 μg/mL Streptomycin |
| T24 | Human urinary | ATCC HTB-4 | McCoy's 5a media with 10% fetal bovine |
| | bladder transitional | | serum, 100 U/mL Penicillin, and 100 μg/mL |
| | cell carcinoma | | Streptomycin |
| J82 | Human urinary | ATCC HTB-1 | Eagle's Minimum Essential Medium with 10% |
| | bladder transitional | | fetal bovine serum, 100 U/mL Penicillin, |
| | cell carcinoma | | and 100 μg/mL Streptomycin |
| HIT-T15 | Syrian Golden | ATCC CRL-1777 | Eagle's Minimum Essential Medium (low |
| | Hamster, pancreatic | | glucose) with 10% fetal bovine serum, 100 U/mL |
| | islet of Langerhans | | Penicillin, and 100 μg/mL |
| | beta cells | | Streptomycin |
| ARPE-19 | Human Retinal | ATCC: CRL-2302 | DMEM: F12 media with 10% fetal bovine |
| | Epithelial Cells | | serum, 100 U/ml Penicillin, and 100 μg/ml |
| | | | Streptomycin |
| RF/6A | Macaca Choroid | ATCC: CRL-1780 | EMEM media with 10% fetal bovine serum, |
| | Retinal Endothelial | | 100 U/ml Penicillin, and 100 μg/ml |
| | Cells | | Streptomycin |

[0317] The cells were first analyzed using fluorescent microscopy for the expression of GFP, which also indicated the simultaneous expression of the attached light chain. To detect the expression and subcellular localization of the GFP-LC fusion proteins, the cells were examined by confocal microscopy. Cells from the cell lines RT4, P19, NCl H69, NCl H82, DU145, T24, ARPE-19, RF/6A, and J82, transfected and washed as described above, were fixed with 4% paraformaldehyde. The fixed cells were imaged with a confocal microscope using a 488 nm excitation laser and an emission path of 510-530 nm. The data shows that each cell type was successfully transfected and, that except the small cell lung cancer cell lines NCl H69 and NCl H82, cells from each cell line expressed both GFP and the GFP-light chain fusion proteins (Table 6).

TABLE 6
Expression of Mammalian Constructs in Cells

| | | Expression | | | | |
|---|---|---|---|---|---|---|
| | | | GFP- | GFP- | GFP- | |
| Cell Line | Origin | GFP | LC/A | LC/B | LC/C1 | GFP-LC/E |
| RT4 | Bladder | + | + | + | + | + |
| | carcinoma | | | | | |
| P19 | Embryonic | + | + | + | + | + |
| | carcinoma | | | | | |
| NCI H69 | Small Cell Lung | − | − | − | − | − |
| | carcinoma | | | | | |
| NCI H82 | Small Cell Lung | − | − | − | − | − |
| | carcinoma | | | | | |
| DU145 | Prostate | + | + | + | + | + |
| | carcinoma | | | | | |
| T24 | Bladder | + | + | + | + | + |
| | carcinoma | | | | | |
| J82 | Bladder | + | + | + | + | + |
| | carcinoma | | | | | |
| ARPE-19 | Retinal Epithelial | + | + | +/− | + | − |
| | pigment | | | | | |
| RF/6A | Retinal | + | + | + | + | + |
| | Endothelial | | | | | |

[0318] In order for cancer cells to be sensitive to the endoproteolytic cleavage, the target SNARE protein must be endogenously expressed and accessible to the light chain cleavage. To detect the presence of cleaved SNARE products a Western blot analysis was performed. Cells from the cell lines RT4, P19, NCl H69, NCl H82, DU145, T24, ARPE-19, RF/6A, and J82, transfected and washed as described above, were lysed, by adding 200 μL of 2×SDS-PAGE Loading Buffer to each well, and the lysates were transferred to tubes and heated to 95° C. for 5 minutes. A 12 μL of each sample was separated by MOPS polyacrylamide gel electrophoresis using NuPAGE® Novex 4-12% Bis-Tris precast polyacrylamide gels (Invitrogen Inc., Carlsbad, Calif.) under denaturing, reducing conditions. Separated peptides were transferred from the gel onto nitrocellulose membranes by Western blotting using an electrophoretic tank transfer apparatus. The membranes were blocked by incubation, at room temperature, for 1 hour with gentle agitation, in a Blocking Solution containing Tris-Buffered Saline (TBS) (25 mM 2-amino-2-hydroxymethyl-1,3-propanediol hydrochloric acid (Tris-HCl)(pH 7.4), 137 mM sodium chloride, 2.7 mM potassium chloride), 0.1% polyoxyethylene (20) sorbitan monolaureate, 2% Bovine Serum Albumin (BSA), and 5% nonfat dry milk. Blocked membranes were incubated at 4° C. over night in TBS, 0.1% polyoxyethylene (20) sorbitan monolaureate, 2% BSA, and either 1) a 1:5,000 dilution of S9684 α-SNAP-25 rabbit polyclonal antiserum as the primary antibody (Sigma, St. Louis, Mo.); 2) a 1:5,000 dilution of sc17836 α-Syntaxin-1 rabbit polyclonal antiserum as the primary antibody (Santa Cruz Biotechnology, Santa Cruz, Calif.); or 3) a 1:5,000 dilution of sc69706 a-VAMP-2 mouse polyclonal antiserum as the primary antibody (Santa Cruz Biotechnology, Santa Cruz, Calif.). Primary antibody probed blots were washed three times for 5 minutes each time in TBS, polyoxyethylene (20) sorbitan monolaureate. Washed membranes were incubated at room temperature for 1 hour in TBS, 0.1% polyoxyethylene (20) sorbitan monolaureate, 2% BSA containing either 1) a 1:5,000 dilution of 81-6720 goat polyclonal α-mouse immunoglobulin G, heavy and light chains (IgG, H+L) antibody conjugated to horseradish peroxidase (Invitrogen, Inc., Carlsbad, Calif.) as a secondary antibody; or 2) a 1:5,000 dilution of 81-6120 goat polyclonal α-rabbit immunoglobulin G, heavy and light chains (IgG, H+L) antibody conjugated to horseradish peroxidase (Invitrogen, Inc., Carlsbad, Calif.) as a secondary antibody. Secondary antibody-probed blots were washed three times for 5 minutes each time in TBS, 0.1% polyoxyethylene (20) sorbitan monolaureate. Signal detection of the labeled SNARE products were visualized using the ECL Plus™ Western Blot Detection System, a chemiluminescence-based detection system, (GE Healthcare-Amersham, Piscataway, N.J.). The membranes were imaged and the percent of cleaved SNARE product were quantified with a Typhoon 9410 Variable Mode Imager and Imager Analysis software (GE Healthcare-Amersham, Piscataway, N.J.). The data shows that SNAP-25 and VAMP-2 were expressed in some cell types, while Syntaxin was expressed in each cell type tested (Table 7).

TABLE 7
Presence of SNARE in Cells

| | | SNARE Presence in Cells | | |
|---|---|---|---|---|
| Cell Line | Origin | SNAP-25 | VAMP-2 | Syntaxin-1 |
| RT4 | Bladder | − | + | + |
| | carcinoma | | | |
| P19 | Embryonic | + | − | + |
| | carcinoma | | | |
| NCI H69 | Small cell Lung | ND | ND | ND |
| | carcinoma | | | |
| NCI H82 | Small cell Lung | ND | ND | ND |
| | carcinoma | | | |
| DU145 | Prostate | + | + | + |
| | carcinoma | | | |
| T24 | Bladder | − | + | + |
| | carcinoma | | | |
| J82 | Bladder | + | − | + |
| | carcinoma | | | |
| ARPE-19 | Retinal Epithelial | − | − | + |
| | pigment | | | |
| RF/6A | Retinal | + | − | + |
| | Endothelial | | | |

[0319] In addition, the data shows that 1) BoNT/A light chain was able to cleave SNAP-25 present in cells from a P19 embryonic carcinoma cell line, a DU145 prostate carcinoma cell line, RF/6A retinal endothelial and a J82 urinary bladder carcinoma cell line (Table 8); 2) BoNT/E light chain was able to cleave SNAP-25 present in cells from a P19 embryonic carcinoma cell line, RF/6A retinal endothelial, and a J82 urinary bladder carcinoma cell line (Table 8); 3) BoNT/B light chain was unable to cleave VAMP-2 in all cell lines tested except ARPE-19 and RF/6A that do not express VAMP-2 (Table 8); and 4) BoNT/C1 light chain was able to cleave Syntaxin-1 present in cells from a T24 urinary bladder carcinoma cell line, ARPE-19 retinal epithelial pigment cells, and RF/6A retinal endothelial cells (Table 8). These results indicate that treatment of target cells with the appropriate Clostridial toxin light chain will cleave one of three SNARE proteins to inhibit exocytosis. This inhibition will prevent the release of growth factors, angiogenic factors, proteases, and anti-apoptotic survival factors necessary for cancer cell growth and survival. Moreover, this inhibition will inhibit the delivery of receptors involved in proliferation, migration, survival, and chemotaxis to the surface of cells involved in aberrant blood vessel formation.

TABLE 8
Cleavage of SNARE by Light Chain

| | | SNARE Cleavage by Light Chain | | | |
|---|---|---|---|---|---|
| | | SNAP-25 | | VAMP-2 | Syntaxin-1 |
| Cell Line | Origin | LC/A | LC/E | LC/B | LC/C1 |
| RT4 | Bladder | − | − | − | − |
| | carcinoma | | | | |
| P19 | Embryonic | + | + | − | − |
| | carcinoma | | | | |
| NCI H69 | Small Cell Lung | ND | ND | ND | ND |
| | carcinoma | | | | |
| NCI H82 | Small Cell Lung | ND | ND | ND | ND |
| | carcinoma | | | | |
| DU145 | Prostate | + | − | − | − |
| | carcinoma | | | | |
| T24 | Bladder | − | − | − | + |
| | carcinoma | | | | |
| J82 | Bladder | + | + | − | − |
| | carcinoma | | | | |
| ARPE-19 | Retinal Epithelial | − | − | − | + |
| | pigment | | | | |
| RF/6A | Retinal | + | + | − | + |
| | Endothelial | | | | |

[0320] To further test whether SNARE cleavage disrupts exocytosis of hormones and growth factors, an insulin release assay was performed. HIT-T15 cells release insulin when placed in high concentration of glucose. It has also been shown these cells express SNAP-25, and that SNAP-25 is an integral component of the SNARE complex needed for insulin release. HIT-T15 cells, transfected and washed as described above, were placed in DMEM media containing either 1) 5.6 mM glucose for basal insulin release (low glucose); or 2) 25.2 mM glucose for evoked insulin release (high glucose). Cells were incubated in a 37° C. incubator under 5% carbon dioxide for approximately 1 hour to allow for insulin release. The incubated media was collected and the amount of insulin released was determined using an insulin ELISA kit. The assay was performed according to the manufacturer's instructions (APLCO Diagnostics, Salem, N.H.). Exocytosis was expressed as the amount of insulin released per 1×10⁶ cells per hour.

[0321] The data shows that HIT-T15 cells transfected with GFP-LC/A, GFP-LC/B, and GFP-LC/E released less insulin than untransfected cells or cells transfected with GFP (Table 9). In addition, the basal insulin released in media containing a low glucose concentration (5.6 mM) remained unchanged between the transfected cells. The data indicate that BoNT/A, BoNT/B and BoNT/E light chains inhibited the release of insulin by cleaving SNAP-25 or VAMP-2 in HIT-T15 cells.

TABLE 9
Insulin Release from HIT-H15 Cells

| Construct | 5.6 mM Glucose (Low) | 25.2 mM Glucose (High) |
|---|---|---|
| Untransfected | 6.5 +/− 0.1 | 9.9 +/− 2.9 |
| Control | | |
| GFP | 4.3 +/− 0.7 | 10.8 +/− 2.1 |
| GFP-LCA | 3.2 +/− 0.4 | 4.5 +/− 0.6 |
| GFP-LCB | 3.4 +/− 0.2 | 5.5 +/− 0.9 |
| GFP-LCE | 4.2 +/− 0.7 | 4.4 +/− 1.0 |

[0322] The botulinum toxin light chain activity may also inhibit the trafficking of proteins to and from the plasma membrane. To test whether SNARE cleavage disrupts delivery and localization of receptors to the plasma membrane, the presence or absence of cell membrane proteins was determined in cells transfected with botulinum toxin light chains. Cells from the cell lines DU145, J82, ARPE-19, and PF/6A transfected and washed as described above, were treated with 2 mM NHS-LC-Biotin (Thermo Scientific, Rockford, Ill.) at 4° C. for 2 hours. The cells were then treated with 250 mM Tris-HCl (pH 7.5) for 30 minutes at 4° C., and then washed three times in TBS. Membranes proteins were isolated using the Membrane Protein extraction kit (Calbiochem, San Diego, Calif.) according to the manufacturer's instructions. The biotinylated proteins were precipitated with immobilized-avidin (Thermo Scientific, Rockford, Ill.). After three washes with TBS, the samples were suspended in 50 μL 2×SDS-PAGE loading buffer and separated by MOPS polyacrylamide gel electrophoresis using NuPAGE® Novex 4-12% Bis-Tris precast polyacrylamide gels (Invitrogen Inc., Carlsbad, Calif.) under denaturing, reducing conditions. The gel was washed and fixed in 10% methanol and 7% acetic acid for 30 minutes. The wash solution was removed and the gel incubated in SYPRO® Ruby protein gel stain solution (Bio-Rad Laboratories, Hercules, Calif.) for 3 hours to overnight at room temperature. The stained gel was destained in 10% methanol and 7% acetic acid for 30 minutes. Chemiluminescence from the destained gel was visualized with a Typhoon 9410 Variable Mode Imager and Imager Analysis software (GE Healthcare-Amersham, Piscataway, N.J.). The data show that treatment with a BoNT/A light chain inhibits the trafficking of proteins to and from the plasma membrane, which would necessarily affect the population of receptors located on the surface of the cell. This disrupted trafficking may cause the target cells to become more sensitive to apoptotic factors and less sensitive to growth signals and angiogenic factors.

[0323] By establishing the SNARE cleavage effects by the light chains, and which light chains cleaved which SNARE proteins in each cell line, TVEMPs were subsequently designed in a manner that targeted the TVEMP to receptors that were overexpressed or uniquely expressed in target cells in order to deliver the catalytic light chain.

### Example 2

### Presence of Receptor and Target in Disease Relevant Cells

[0324] This example illustrates how to determine the presence of a cognate receptor that can bind with the targeting moiety of a TVEMP disclosed herein as well as the presence of the target SNARE protein of the enzymatic domain of a TVEMP disclosed herein.

[0325] In order for a TVEMP to be an effective agent for the methods of treating cancer disclosed herein, the cancer cells must express the appropriate receptor that can bind with the targeting moiety of a TVEMP as well as the appropriate SNARE protein that can be cleaved by the enzymatic domain of the TVEMP.

[0326] To culture cells, an appropriate density of cells were plated into the wells of 96-well tissue culture plates containing 100 μL of an appropriate medium (Table 10), but without serum, and with or without 25 pg/mL of GT1b (Alexis Biochemicals, San Diego, Calif.). Cells were plated and incubated in a 37° C. incubator under 5% carbon dioxide until the cells differentiated, as assessed by standard and routine morphological criteria, such as growth arrest (approximately 3 days). The media was aspirated from each well and replaced with 100 μL of fresh media containing various concentrations of the botulinum toxin or TVEMP being tested in order to generate a full dose-response. The assay was done in triplicate. After 24 hrs treatment, the cells were washed, incubated for an additional two days without toxin or TVEMP to allow for the cleavage of the SNARE substrate. After this incubation, the cells were washed by aspirating the media and rinsing each well with 3 mL of 1×PBS. The cells were harvested by lysing in freshly prepared Lysis Buffer (50 mM HEPES, 150 mM NaCl, 1.5 mM MgCl₂, 1 mM EGTA, 1%, 4-octylphenol polyethoxylate) at 4° C. for 30 minutes with constant agitation. Lysed cells were centrifuged at 4000 rpm for 20 min at 4° C. to eliminate debris using a bench-top centrifuge. The total protein concentrations of the cell lysates were measured by Bradford assay.

TABLE 10
Cell Lines and Media

| Cell Line | Origin | Source | Serum Growth Media Composition |
|---|---|---|---|
| RT4 | Human urinary | ATCC HTB-2 | McCoy's 5a media with 10% fetal bovine |
| | bladder transitional | | serum, 100 U/mL Penicillin, and 100 μg/mL |
| | cell carcinoma | | Streptomycin |
| P19 | Mouse embryonic | ATCC CRL-1825 | Alpha Minimal Essential Medium media |
| | carcinoma | | with 7.5% bovine calf serum, 2.5% fetal |
| | | | bovine calf serum, 100 U/mL Penicillin, and |
| | | | 100 μg/mL Streptomycin |
| NCI H69 | Human small lung | ATCC HTB-119 | RPMI-1640 media with 10% fetal bovine |
| | carcinoma | | serum, 100 U/mL Penicillin, and 100 μg/mL |
| | | | Streptomycin |
| NCI H82 | Human small lung | ATCC HTB-175 | RPMI-1640 media with 10% fetal bovine |
| | carcinoma | | serum, 100 U/mL Penicillin, and 100 μg/mL |
| | | | Streptomycin |
| DU-145 | Human prostate | ATCC HTB-81 | Eagle's Minimum Essential Medium with 10% |
| | carcinoma derived | | fetal bovine serum, 100 U/mL Penicillin, |
| | from brain | | and 100 μg/mL Streptomycin |
| PC-3 | Human prostate | ATCC CRL-1435 | F-12K media with 10% fetal bovine serum, |
| | carcinoma derived | | 100 U/mL Penicillin, and 100 μg/mL |
| | from brain | | Streptomycin |
| LNCaP clone | Human prostate | ATCC CRL-1740 | RPMI-1640 Eagle's with 10% fetal bovine |
| FGC | carcinoma derived | | serum, 100 U/mL Penicillin, and 100 μg/mL |
| | from brain | | Streptomycin |
| RWPE-1 | Human prostate | ATCC CRL-11609 | Dulbecco's Minimum Essential Medium with |
| | | | 10% Fetal Bovine Serum, 2 mM |
| | | | GlutaMAX ™ I with 0.1 mM Non-Essential |
| | | | Amino-Acids, 10 mM HEPES, 1 mM |
| | | | Sodium Pyruvate, 100 U/mL Penicillin, and |
| | | | 100 μg/mL Streptomycin |
| T24 | Human urinary | ATCC HTB-4 | McCoy's 5a media with 10% fetal bovine |
| | bladder transitional | | serum, 100 U/mL Penicillin, and 100 μg/mL |
| | cell carcinoma | | Streptomycin |
| J82 | Human urinary | ATCC HTB-1 | Eagle's Minimum Essential Medium with 10% |
| | bladder transitional | | fetal bovine serum, 100 U/mL Penicillin, |
| | cell carcinoma | | and 100 μg/mL Streptomycin |
| MCF-7 | Human breast | ATCC HTB-22 | Dulbecco's Minimum Essential Medium with |
| | carcinoma | | 10% Fetal Bovine Serum, 2 mM |
| | | | GlutaMAX ™ I with 0.1 mM Non-Essential |
| | | | Amino-Acids, 10 mM HEPES, 1 mM |
| | | | Sodium Pyruvate, 100 U/mL Penicillin, and |
| | | | 100 μg/mL Streptomycin |
| SiMa | Human | DSMZ ACC 164 | RPMI 1640 with 10% Fetal Bovine Serum, |
| | neuroblastoma | | 0.1 mM Non-Essential Amino-Acids, 10 mM |
| | | | HEPES, 1 mM Sodium Pyruvate, 100 U/mL |
| | | | Penicillin, and 100 μg/mL Streptomycin, |
| 266.6 | Mouse pancreatic | ATCC CRL-2151 | Dulbecco's Minimum Essential Medium with |
| | | | 10% Fetal Bovine Serum, 2 mM |
| | | | GlutaMAX ™ I with 0.1 mM Non-Essential |
| | | | Amino-Acids, 10 mM HEPES, 1 mM |
| | | | Sodium Pyruvate, 100 U/mL Penicillin, and |
| | | | 100 μg/mL Streptomycin |
| HIT-T15 | Hamster pancreatic | ATCC CRL-1777 | Eagle's Minimum Essential Medium (low |
| | islet of Langerhans | | glucose) with 10% fetal bovine serum, 100 U/mL |
| | beta cells | | Penicillin, and 100 μg/mL |
| | | | Streptomycin |
| HUVEC | Human Umbilical | Cell Applications, Inc., | Endothelial Cell Growth Medium (Cell |
| | Vein Endothelial | San Diego, CA, Cat. | Applications, Inc., San Diego, CA, Cat. No. |
| | Cells | No. 200-05n | 211-500) |
| ARPE-19 | Human Retinal | ATCC: CRL-2302 | DMEM: F12 media with 10% fetal bovine |
| | Epithelial Cells | | serum, 100 U/ml Penicillin, and 100 μg/ml |
| | | | Streptomycin |
| RF/6A | Macaca Choroid | ATCC: CRL-1780 | EMEM media with 10% fetal bovine serum, |
| | Retinal Endothelial | | 100 U/ml Penicillin, and 100 μg/ml |
| | Cells | | Streptomycin |

[0327] To determine whether a target cell expresses the appropriate receptor and target SNARE protein, a Western blot analysis can be performed.

[0328] In one experiment, cells from the cell lines RT4, P19, NCl H69, NCl H82, DU-145, T24, J82, LNCaP, ARPE-19, RF/6A and PC-3, transfected and washed as described above, were harvested by adding 40 μL of 2×SDS-PAGE Loading Buffer (Invitrogen, Inc., Carlsbad, Calif.) and heating the plate to 95° C. for 5 min. A 12 μL of the harvested sample was separated by MOPS polyacrylamide gel electrophoresis under denaturing, reducing conditions using 1) CRITERION® 12% Bis-Tris precast polyacrylamide gels (Bio-Rad Laboratories, Hercules, Calif.), when separating the SNAP-25₁₉₇ cleavage product; 2) NuPAGE® 12% Bis-Tris precast polyacrylamide gels (Invitrogen Inc., Carlsbad, Calif.), when separating both the uncleaved SNAP-25₂₀₆ substrate and the SNAP-25₁₉₇ cleavage product; or 3) NuPAGE® Novex 4-12% Bis-Tris precast polyacrylamide gels (Invitrogen Inc., Carlsbad, Calif.), when separating all other proteins. Separated peptides were transferred from the gel onto nitrocellulose membranes by Western blotting using a electrophoretic tank transfer apparatus. The membranes were blocked by incubation at room temperature for 1 hour with gentle agitation in a Blocking Solution containing Tris-Buffered Saline (TBS) (25 mM 2-amino-2-hydroxymethyl-1,3-propanediol hydrochloric acid (Tris-HCl)(pH 7.4), 137 mM sodium chloride, 2.7 mM potassium chloride), 0.1% polyoxyethylene (20) sorbitan monolaureate, 2% Bovine Serum Albumin (BSA), and 5% nonfat dry milk. Blocked membranes were incubated at 4° C. overnight in TBS, 0.1% polyoxyethylene (20) sorbitan monolaureate, 2% BSA, and either 1) a 1:5,000 dilution of S9684 α-SNAP-25 rabbit polyclonal antiserum as the primary antibody (Sigma, St. Louis, Mo.); 2) a 1:5,000 dilution of sc123 α-Syntaxin-1 rabbit polyclonal antiserum as the primary antibody (Santa Cruz Biotechnology, Santa Cruz, Calif.); 3) a 1:5,000 dilution of sc13992 α-VAMP-1/2/3 rabbit polyclonal antiserum as the primary antibody (Santa Cruz Biotechnology, Santa Cruz, Calif.); 4) a 1:5,000 dilution of sc50371 α-SNAP-23 rabbit polyclonal antiserum as the primary antibody (Santa Cruz Biotechnology, Santa Cruz, Calif.); 5) a 1:5,000 dilution of sc28955 α-SVC2 rabbit polyclonal antiserum as the primary antibody (Santa Cruz Biotechnology, Santa Cruz, Calif.); 6) a 1:5,000 dilution of sc123 α-FGFR3 rabbit polyclonal antiserum as the primary antibody (Santa Cruz Biotechnology, Santa Cruz, Calif.); 7) a 1:5,000 dilution of sc9112 α-KOR1 rabbit polyclonal antiserum as the primary antibody (Santa Cruz Biotechnology, Santa Cruz, Calif.); 8) a 1:5,000 dilution of H00004987-D01P α-OPRL1 rabbit polyclonal antiserum as the primary antibody (Novus Biologicals, Littleton, Colo.); and 9) a 1:5,000 dilution of sc47778 α-β-actin mouse monoclonal antiserum as the primary antibody (Santa Cruz Biotechnology, Santa Cruz, Calif.). Primary antibody probed blots were washed three times for 5 minutes each time in TBS, polyoxyethylene (20) sorbitan monolaureate. Washed membranes were incubated at room temperature for 1 hour in TBS, 0.1% polyoxyethylene (20) sorbitan monolaureate, 2% BSA containing either 1) a 1:5,000 dilution of 81-6720 goat polyclonal a-mouse immunoglobulin G, heavy and light chains (IgG, H+L) antibody conjugated to horseradish peroxidase (Invitrogen, Inc., Carlsbad, Calif.) as a secondary antibody; or 2) a 1:5,000 dilution of 81-6120 goat polyclonal a-rabbit immunoglobulin G, heavy and light chains (IgG, H+L) antibody conjugated to horseradish peroxidase (Invitrogen, Inc., Carlsbad, Calif.) as a secondary antibody. Secondary antibody-probed blots were washed three times for 5 minutes each time in TBS, 0.1% polyoxyethylene (20) sorbitan monolaureate. Signal detection of the labeled SNARE products were visualized using the ECL Plus™ Western Blot Detection System, a chemiluminescence-based detection system (GE Healthcare-Amersham, Piscataway, N.J.). The membranes were imaged and the percent of cleaved SNARE product was quantified with a Typhoon 9410 Variable Mode Imager and Imager Analysis software (GE Healthcare-Amersham, Piscataway, N.J.). The data shows that this approach can identify the receptors and SNARE proteins present in the cells comprising each cell line (Table 11).

TABLE 11
Expression of Receptors and SNARE Proteins in Target Cells

| | Expression | | | | | | | |
|---|---|---|---|---|---|---|---|---|
| Cell Line | SNAP-25 | SNAP-23 | VAMP-2 | Syntaxin-1 | FGFR3 | SV2C | OPRL-1 | KOR-1 |
| RT4 | + | − | + | + | + | + | ND | + |
| P19 | + | − | − | + | + | − | ND | + |
| NCI H69 | + | − | + | + | + | − | ND | + |
| NCI H82 | + | − | + | + | + | − | ND | + |
| DU-145 | ++ | + | ++ | ++ | +++ | ND | ND | + |
| PC-3 | − | ++ | +/− | ++ | +++ | ND | ND | + |
| LNCaP | + | + | + | + | +++ | +++ | ++ | + |
| clone FGC | | | | | | | | |
| T24 | − | ++ | + | + | ++ | ++ | ++ | + |
| J82 | ++ | +/− | ++ | + | +++ | ++ | ++ | + |
| ARPE-19 | − | + | − | + | + | + | − | + |
| RF/6A | + | − | − | + | + | + | − | + |

ND, not determined

[0329] Once cell lines comprising cells including the appropriate receptor and SNARE proteins were identified, the ability of a botulinum toxin or TVEMP to intoxicate these cells can be determined by detecting the presence of cleaved SNARE products using Western blot analysis. An appropriate density of cells from each cell line to be tested are plated into the wells of 96-well tissue culture plates containing 100 μL of an appropriate medium (Table 7) with or without 25 μg/mL of GT1b (Alexis Biochemicals, San Diego, Calif.). Cells are plated and incubated in a 37° C. incubator under 5% carbon dioxide until the cells differentiated, as assessed by standard and routine morphological criteria, such as growth arrest (approximately 3 days). The media is aspirated from each well and is replaced with 100 μL of fresh media containing various concentrations of the botulinum toxin or TVEMP being tested sufficient to generate a full dose-response. The assay is done in triplicate. After 24 hrs treatment, the cells are washed, incubated for an additional two days without toxin or TVEMP to allow for the cleavage of the SNARE substrate. After this incubation, the cells are washed by aspirating the media and rinsing each well with 3 mL of 1×PBS. The cells are harvested by lysing in freshly prepared Lysis Buffer (50 mM HEPES, 150 mM NaCl, 1.5 mM MgCl₂, 1 mM EGTA, 1%, 4-octylphenol polyethoxylate) at 4° C. for 30 minutes with constant agitation. Lysed cells are centrifuged at 4000 rpm for 20 min at 4° C. to eliminate debris using a bench-top centrifuge. The protein concentrations of cell lysates are measured by Bradford assay. Samples of the cell lysates are analyzed by Western blot analysis as described above.

[0330] In one experiment, differentiated cells from the cell lines LNCaP, J82, and MCF-7, transfected as described above. The media was aspirated from each well and the differentiated cells were treated by replacing with fresh media containing either 1) 0 (untreated sample), 0.12 nM, 0.36 nM, 1.1 nM, 3.3 nM, 10 nM, 30 nM, and 90 nM of a BoNT/A; 2) 0 (untreated sample), and 50 nM of a BoNT/A; 3) 0 (untreated sample), 0.12 nM, 0.36 nM, 1.1 nM, 3.3 nM, 10 nM, 30 nM, and 90 nM of a TVEMP designated Noci-LH_{N}/A; or 4) 0 (untreated sample), and 166 nM of a TVEMP designated Noci-LHN/A. After 1) 3-15 hours; 2) 6 hours or 3) 24 hours treatment, the cells were washed, incubated for an additional 16 hours without toxin or TVEMP to allow for the cleavage of the SNAP-25 substrate. After this incubation, the cells were washed and harvested as described above. The presence of cleaved SNAP-25 product was detected using Western blot analysis as described above using a 1:5,000 dilution of S9684 a-SNAP-25 rabbit polyclonal antiserum as the primary antibody (Sigma, St. Louis, Mo.) as the primary antibody and a 1:5,000 dilution of 81-6120 goat polyclonal a-rabbit immunoglobulin G, heavy and light chains (IgG, H+L) antibody conjugated to horseradish peroxidase (Invitrogen, Inc., Carlsbad, Calif.) as a secondary antibody. These results are shown in Table 12.

TABLE 12
Cleavage of SNARE Substrate

Lowest Concentration and Earliest Time
for Cleavage Detection

| Cell Line | BoNT/A | Noci-LH_{N}/A |
|---|---|---|
| LNCaP | 50 nM at 9 hours | 166 nM at 9 hours |
| J82 | 50 nM at 3 hours | 166 nM at 3 hours |
| | 1.1 nM at 24 hours | |
| MCF-7 | 1.1 nM at 6 hours | ND |

ND, not determined

[0331] Taken together, the data shows that 1) BoNT/A was able to cleave SNAP-25 present in cells from a LNCaP prostate carcinoma cell line, a J82 urinary bladder carcinoma cell line, and a MCF-7 breast carcinoma cell line (Table 12); 2) Noci-LH_{N}/A was able to cleave SNAP-25 present in cells from a LNCaP prostate carcinoma cell line and a J82 urinary bladder carcinoma cell line (Table 12). These results indicate that treatment of cancer cells with the appropriate Clostridial toxin light chain will cleave one of three SNARE proteins to inhibit exocytosis. This inhibition will prevent the release of growth factors, angiogenic factors, and anti-apoptotic survival factors necessary for cancer cell growth and survival. Lastly, these experiments illustrate the validity of the general concept that intracellular delivery of a botulinum light chain into cancer cells results in cleavage of the appropriate SNARE protein not only by transfecting light chain constructs, but also by using the endogenous signal transduction pathway for the targeting domain.

### Example 3

### Effects of Light Chain Delivery on Angiogenesis

[0332] This example illustrates that treatment with a botulinum toxin or TVEMP will affect angiogenesis to a degree sufficient to provide a therapeutic benefit to an individual suffering from a disease or disorder associated with aberrant new vessel formation.

[0333] The blockade of exocytosis resulting from a treatment with botulinum toxin or TVEMP based on LHN/A-G will likely prevent the release of angiogenic factors, including, e.g., Vascular endothelial growth factor (VEGF), Fibroblast Growth Factor-1 (FGF1) and FGF2. Preventing the release of these angiogenic factors will reduce, or altogether inhibit, angiogenesis in the area where the toxin or TVEMP is administered. To test whether such a treatment reduces or inhibits angiogenesis, four different assays were performed: a VEGF release assay, a cell migration assay, an in vitro blood vessel formation assay, and a human angiogenesis protein array assay.

[0334] VEGF is known to be a potent mitogen for vascular endothelial cells and an inducer of physiological and pathological angiogenesis. To validate the potential for a botulinum toxin or TVEMP in inhibiting angiogenesis, the ability of a toxin or TVEMP to inhibit release of VEGF from a cell was assessed. To conduct a VEGF release assay, about 600,000 cells from a SiMa cell line were plated into the wells of 6-well collagen IV tissue culture plates containing 3 mL of a serum-free medium containing Minimum Essential Medium, 2 mM GlutaMAX™ I with Earle's salts, 1×B27 supplement, 1×N2 supplement, 0.1 mM Non-Essential Amino Acids, 10 mM HEPES and 25 μg/mL GT1b. These cells were incubated in a 37° C. incubator under 5% carbon dioxide until the cells differentiated, as assessed by standard and routine morphological criteria, such as growth arrest and neurite extension (approximately 3 days). The media from the differentiated cells was aspirated from each well and replaced with fresh media containing either 0.77 mg/mL of a BoNT/A or 1 mg/mL of a Noci-LH_{N}/A TVEMP. As a control, cells were treated with media alone in parallel. After treatment the media was removed and replaced with fresh differentiation media. A 60 μL aliquot of media was removed from each well and replaced with 100 μL differentiation media 1 day, 2 days, 3 days, and 4 days after the addition of fresh differentiation media. The removed media was stored at −20° C. until needed. After the last sample was removed, the cells were trypsinized and the number of cells in each well was counted.

[0335] The presence of VEGF in the collected samples was detected using a K151BMB-1 VEGF tissue culture assay (Meso Scale Discovery, Gaithersburg, Md.). A MULTI-ARRAY® 96-well Small Spot Plate VEGF plate was blocked with 150 μL Blocking Buffer (PBS with 0.05% polyoxyethylene (20) sorbitan monolaureate, 2% ECL Blocking reagent (GE Healthcare-Amersham, Piscataway, N.J.), and 1% goat serum (Rockland Immunochemicals, Gilbertsville, Pa.) and shaken at 600 rpm for one hour. The blocking buffer was discharged and 25 μL of each sample was added to each well of the VEGF plate and the plate was incubated at 4° C. for 2 hours. The plate was washed three times with 200 μL PBS-T (PBS plus 0.05% Tween-20) and then 25 μl of SULFO-TAG α-hVEGF mouse monoclonal antibody 5 pg/mL in 2% antibody buffer (PBS plus 0.05% polyoxyethylene (20) sorbitan monolaureate, and 2% ECL Blocking reagent (GE Healthcare-Amersham, Piscataway, N.J.) added and incubated on a shaker at 600 rpm at RT for 1 hour. Plates were washed three times with PBS-T and then 150 μL Read Buffer (MSD, Cat# R92TC-1) were added per well. Plates were read in a SECTOR™ Imager 6000 Image Reader (Meso Scale Discovery, Gaithersburg, Md.). The data was then exported into Microsoft Office Excel 2007. The amount of VEGF detected was normalized to the number of cells present in the well and the percent VEGF release value was calculated using the control as the 100% value.

[0336] The data shows that treatment with BoNT/A inhibits VEGF release by about 50% in SiMa cells (Table 13). Although the addition of Noci-LH_{N}/A TVEMP did not appear to inhibit VEGF release, this result could be due to the lower potency of Noci-LH_{N}/A TVEMP compared to BoNT/A in SiMa cells. The EC₅₀ of BoNT/A in differentiated SiMa cells is less than about 0.5 nM, while the EC₅₀ of Noci-LH_{N}/A TVEMP is more than 30 nM. As such, the lack of effect of Noci-LH_{N}/A TVEMP in SiMa cells is simply due to the low amount of OPRL-1 receptor present in these cells. This lack of effect corroborates the concept that cells expressing low levels of the targeted receptor will not be affected by botulinum toxin or TVEMP treatment (i.e. normal cells surrounding tumors over-expressing a receptor of interest). In addition, the finding that the addition of IL-6, a known transcriptional regulator of VEGF, had no effect on VEGF release is consistent with reports that the addition of exogenous IL-6 does not affect VEGF secretion.

TABLE 13
VEGF Release Assay

| | VEGF Release | | |
|---|---|---|---|
| Time Point | Control | BoNT/A | Noci-LH_{N}/A TVEMP |
| Day 1 | 100% | 69% | 119% |
| Day 2 | 100% | 57% | 123% |
| Day 3 | 100% | 53% | 125% |
| Day 4 | 100% | 57% | 104% |

[0337] Since VEGF is an inducer of migration, a compound that affects the release of VEGF should effect migration as well. Moreover, inhibition of exocytosis by a compound will also inhibit the release of additional factors involved in cell migration. To determine whether a botulinum toxin or TVEMP treatment could reduce or inhibit cell migration, a cell migration assay (Essen Bioscience, Ann Arbor, Mich.) was performed according to the manufacturer's instructions. On day 1, DU-145 cells were plated at 25,000 cells per well in a 96-well Essen ImageLock plate in growth media. On day 2 the cells were treated with either 10 nM BoNT/A, 40 nM Noci-LH_{N}/A TVEMP, or 90 nM Gal-LH_{N}/A TVEMP in growth media. As a positive control for inhibition of migration, cells were treated with 0.11 μM, 0.33 μM, or 1 μM Cytochalasin-D. As a negative control, cells were treated with media alone. On day 3, after the cells had reached 100% confluence, the cells were washed with media and then a 96-pin WoundMaker (Essen Bioscience, Ann Arbor, Mich.) was used to simultaneously create wounds in all the wells. After cell wounding, the media was removed and the cells were washed two times with 150 μL Dulbecco's Phosphate Buffered Saline with Ca²⁺ and Mg²⁺ and then 100 μL of media was added. The plate was then placed in an INCUCYTE™ scanner (Essen Bioscience, Ann Arbor, Mich.) and images were taken every 1 hour for 45 consecutive hours. The data was analyzed as relative wound density versus time using the INCUCYTE™ Cell Migration software. Relative wound density is designed to be zero at time zero, and 100% when the cell density inside the wound is the same as the cell density outside the initial wound.

[0338] The results are presented in Table 14. The results showed that cells pre-treated with either Noci-LH_{N}/A TVEMP or Gal-LH_{N}/A TVEMP migrated slightly slower than cells treated with media alone. The result showed that treatment with Noci-LH_{N}/A TVEMP or Gal-LH_{N}/A TVEMP resulted in a significant reduction in cell migration after 24 hours, about 10% reduction when compared to cells treated with media alone. Cells treated with BoNT/A did not exhibit an affect on cell migration. The cells treated with Cytochalasin-D did not migrate. When the same experiment was performed with PC-3 cells, that do not contain SNAP-25, rather than a reduction, an increase in migration was observed (data not shown), suggesting that initially, likely via activation of their ligand receptors, BoNT/A, Noci-LH_{N}/A TVEMP, and Gal-LH_{N}/A TVEMP function to increase migration. But after cleavage of SNAP-25 migration is reduced. As such, a longer exposure to a botulinum toxin and/or TVEMP will most likely result in more dramatic reduction in migration of such treated cells.

TABLE 14
Cell Migration Assay

Relative Wound Density at 24 Hours

| Treatment | Mean | Percent Relative to Media |
|---|---|---|
| Media Control | 78.2 ± 2.4 | 100% |
| BoNT/A | 78.6 ± 1.1 | 101% |
| Noci-LH_{N}/A TVEMP | 71.5 ± 3.3 | 91% |
| Gal-LH_{N}/A TVEMP | 69.5 ± 4.4 | 89% |
| Cytochalasin-D | 3.3 ± 0.2 | 4% |

[0339] Angiogenesis involves multiple steps; to achieve new blood vessel formation, endothelial cells must first escape their stable location by breaking through the basement membrane. Once this is achieved, endothelial cells migrate towards an angiogenic stimulus that might be released from cancer cells, or wound-associated macrophages. In addition, endothelial cells proliferate to provide the necessary number of cells for making a new vessel. Subsequent to this proliferation, the new outgrowth of endothelial cells needs to reorganize into a three-dimensionally tubular structure. To determine whether a botulinum toxin or TVEMP treatment could reduce or inhibit blood vessel formation, an in vitro Endothelial Tube Formation assay (Cell Biolabs, Inc., San Diego, Calif.) was performed according to the manufacturer's instructions. Human Umbilical Vein Endothelial Cells (HUVECs) were grown to 80% confluence in T-75 culture flasks until confluent. Cells were harvested and then plated at 500,000 cells per well for HUVECs in a 6-well plate for 24 hours. After incubation, cells were either kept untreated or treated with 2 nM or 5 nM of BoNT/A or 6 nM or 25 nM of Noci-LH_{N}/A TVEMP for 24 hours. As a positive control for inhibition, cells were treated with a collagenase inhibitor. As a negative control for inhibition, cells were treated with media alone. The cells were then harvested again and plated at 35,000 cells per well onto the ECM gel prepared from murine Engelbreth-Holm-Swan (EHS) tumor cells, which contain multiple angiogenic stimulating factors, such as, e.g., laminin, type IV collagen, heparan sulfate proteoglycans, entactin and growth factors such as FGF2 and TGF-βs. The cells were incubated for 3-4 hours on the ECM gels and then inspected under a microscope and photographed, either before or after staining with Calcein AM.

[0340] An Endothelial Tube Formation assay was also modified to use cells from a tumor cell line since it is known that tumor cells can form tubular structures to allow blood to flow into tumors. In this modified assay, cells from LNCaP, PC-3, DU-145, T24, and J82 cell lines were grown to 80% confluence in T-75 culture flasks. Cells were then harvested and plated at 400,000 cell per well in a 6-well plate containing 3 mL of an appropriate medium (Table 10), but with 1% serum. Cells were incubated in a 37° C. incubator under 5% carbon dioxide for 3 days. After incubation, cells were either kept untreated or treated with 20 nM of BoNT/A or 40 nM of Noci-LH_{N}/A TVEMP for 24 hours. The cells were then harvested, plated on ECM gel plates and inspected as described above.

[0341] The results show that in HUVEC, DU145 and J82 cells, and to a lesser degree in T24 and LNCaP cells, tubes formed on ECM plates treated with media alone, whereas treatment with a collagenase inhibitor prevented the formation of tubes (Table 15). No tubes formed in PC-3 cells. BoNT/A and Noci-LH_{N}/A TVEMP treatment of cells from a LNCaP prostate carcinoma cell line and a J82 bladder carcinoma cell line inhibited the formation of tubes. BoNT/A and Noci-LH_{N}/A TVEMP treatment had no effect on tube formation from HUVEC cultures. This inhibition of tube formation maybe due to inhibition of migration, delivery of receptors and other proteins to the membrane (motility factors and their receptors), adhesion molecules that interact with the matrix or other cells, and/or secretion of proteases.

TABLE 15
Endothelial Tube Formation Assay

| | Inhibition of Endothelial Tube Formation | | | |
|---|---|---|---|---|
| Cell Line | Media | Collagenase Inhibitor | BoNT/A | Noci-LH_{N}/A |
| LNCaP | No | Yes | Yes | Yes |
| PC-3 | — | — | — | — |
| DU-145 | No | ND | ND | ND |
| T24 | No | ND | ND | ND |
| J82 | No | Yes | Yes | Yes |
| HUVEC | No | ND | No | No |

ND, not determined

[0342] To conduct a human angiogenesis protein array screen, cells from a DU-145 prostate cancer cell line were plated in a 100 mm² plate containing Eagle's Minimum Essential Medium with 1% charcoal stripped FBS, 100 U/mL Penicillin, and 100 μg/mL Streptomycin. Cells were grown to a density of 5×10⁶ cells by incubating in a 37° C. incubator under 5% carbon dioxide overnight. After this incubation, the cells were washed by aspirating the media and rinsing the plate with 10 mL of 1×PBS. The washed cells were treated by replacing with fresh media containing 50 nM BoNT/A. For comparison, cells treated with media alone were run in parallel. After 24 hour treatment, the cells were washed, and harvested by lysing in freshly prepared Lysis Buffer (50 mM HEPES, 150 mM NaCl, 1.5 mM MgCl₂, 1 mM EGTA, 1%, 4-octylphenol polyethoxylate) on ice for 30 minutes with constant gentle agitation. Lysed cells were centrifuged at 14,000 g for 5 minutes at 4° C. to eliminate debris. The protein concentrations of cell lysates were measured by Bradford assay. To perform an assay, an array was incubated with 250 μL of each cell lysate containing 500 pg of protein. Array images were captured by scanning the blots with a Typhoon 9410 Imager and quantitation of array was performed with Image Quant TL V2005. Fold increased was determined by dividing signal from untreated over treated sample.

[0343] The results show that the majority of the 35 angiogenesis-related proteins detected were up-regulated in the cells treated with BoNT/A, compared to the untreated control (Table 16). Proteins that increased in expression were involved in promoting angiogenesis except for two proteins that are anti-angiogenic (endostatin and angiostatin). There was increased presence of GDNF, PDGF-AA, and FGF1 that promote cell proliferation, differentiation, cell growth and development. Proteins that promote or initiate angiogenesis were; Coagulation Factor III, EG-VEGF, Angiopoetin-1, Angiopoetin-2, and PD-ECGF. Expressions in proteins involved in glucose metabolism were; DPPIV, IGFBP-1, IGFBP-2, and IGFBP-3. Proteins that enhance cell-cell adhesion were also up-regulated; MIP-1, MMP-9, Endothelin-1, Platelet Factor 4 and TGF-61. The most significant increase was observed for Endocrine gland-derived vascular endothelial growth factor (EG-VEGF), which was almost 100-fold increased. The increase of these proteins in cell lysates may reflect their accumulation in the cytoplasm since exocytosis has been inhibited and the cells cannot release them to the media.

TABLE 16
Human Angiogenesis Array in DU145 Cell line

| | Mean Pixels Density | | Fold | |
|---|---|---|---|---|
| Analyte | Untreated | Treated | Increased | Function |
| External Control | 65451 | 68877 | 1.1 | — |
| Internal Control | 50052 | 59543 | 1.2 | — |
| Coagulation Factor III/TF | 12736 | 26726 | 2.1 | Promotes angiogenesis |
| GDNF | 156 | 428 | 2.7 | Promotes survival and differentiation |
| MIP-1 alpha | 153 | 535 | 3.5 | Chemotaxis |
| CXCL 16 | 3465 | 2352 | 0.7 | Cytokine |
| GM-CSF | 5001 | 1457 | 0.3 | Cytokine |
| Serpin E1 | 677 | 2214 | 3.3 | Inhibit proteases |
| Activin A | 552 | 1672 | 3.0 | Regulate morphogenesis in prostate |
| DPPIV | 3790 | 8923 | 2.4 | Glucose metabolism |
| HB-EGF | 8990 | 6717 | 0.7 | Cell proliferation |
| MMP-9 | 2454 | 5050 | 2.1 | Breakdown extracellular matrix |
| Serpin F1 | 743 | 882 | 1.2 | Inhibit proteases |
| TIMP-1 | 95918 | 86280 | 0.9 | Anti-angiogenic |
| Angiogenin | 6022 | 5468 | 0.9 | Promotes angiogenesis |
| EG-VEGF | 15 | 1368 | 88.3 | Promotes angiogenesis |
| IGFBP-1 | 122 | 1147 | 9.4 | Insulin growth factor protein |
| Pentraxin 3 | 119 | 732 | 6.2 | Involved in complement-mediated |
| | | | | clearance of apoptotic cells |
| TIMP-4 | 152 | 845 | 5.6 | Matrix metalloproteinases inhibitor |
| Angiopoietin-1 | 137 | 807 | 5.9 | Promotes angiogenesis |
| IGFBP-2 | 2379 | 8330 | 3.5 | Insulin growth factor protein |
| PD-ECGF | 942 | 12924 | 13.7 | Promotes angiogenesis |
| Thrombospondin-1 | 2138 | 12359 | 5.8 | Anti-angiogenic |
| Angiopoietin-2 | 129 | 1985 | 15.3 | Antagonist of angiopoietin 1 |
| Endostatin/Collagen XVIII | 2388 | 6800 | 2.8 | Anti-angiogenic |
| IGFBP-3 | 1145 | 11329 | 9.9 | Insulin like promotes cell survivor |
| PDGF-AA | 202 | 908 | 4.5 | Regulates cell proliferation, cellular |
| | | | | differentiation, cell growth, development |
| Angiostatin/Plasminogen | 142 | 893 | 6.3 | Anti-angiogenic |
| Endothelin-1 | 581 | 5828 | 10.0 | Vascular homeostasis |
| uPA | 30656 | 57108 | 1.9 | Serine protease |
| Amphiregulin | 33908 | 20736 | 0.6 | Interacts with the EGF/TGF-alpha |
| | | | | receptor to promote the growth |
| FGF1 | 1189 | 1875 | 1.6 | Promotes proliferation & differentiation |
| IL-8 | 45837 | 19261 | 0.4 | Angiogenic factor |
| FGF2 | 28018 | 23513 | 0.8 | Promotes proliferation & differentiation |
| LAP/TGF-β1 | 360 | 1914 | 5.3 | Increases extracellular matrix |
| | | | | production |
| Platelet Factor 4 | 456 | 819 | 1.8 | Cytokine |
| VEGF | 33513 | 31434 | 0.9 | Affects permeability |

[0344] Taken together, the experiments described in this Example show an overall decrease in angiogenic potential after treatment with botulinum toxin of TVEMP together with an observed increase in intracellular angiogenic proteins. This could be due to either activation of receptors for botulinum toxin or TVEMP that promotes angiogenesis and/or accumulation of vesicular proteins due to blockage of exocytosis after cleavage of SNARE proteins.

### Example 4

### Effects of Light Chain Delivery on Apoptosis

[0345] This example illustrates that treatment with a botulinum toxin or TVEMP will affect apoptosis to a degree sufficient to provide a therapeutic benefit to an individual suffering from a disease or disorder associated with aberrant new blood vessel formation.

[0346] The blockade of exocytosis resulting from a treatment with botulinum toxin or TVEMP based on LHN/A-G will likely result in decreased metabolic activity and decreased cell viability. As such, cancer cells with inhibited exocytosis capability due to a toxin or TVEMP effect will have a reduced ability to survive. To test whether such a treatment causes decreased cancer cell viability, three different assays were performed: a cell viability and metabolism assay, a Caspase-⅜ activity assay, and a human apoptotic protein array assay.

[0347] To determine whether a botulinum toxin or TVEMP treatment could decrease cancer cell viability, a CELLTITER 96® AQueous One Solution Cell Proliferation Assay cell metabolic activity assay (Promega Corp., Madison, Wis.) was performed according to the manufacturer's instructions. This assay is a colorimetric assay containing a tetrazolium compound [3-(4,5-dimethylthiazol-2-yl)-5-(3-carboxymethoxyphenyl)-2-(4-sulfophenyl)-2H-tetrazolium, inner salt; MTS] that is reduced by NADPH or NADH in metabolically active cells. The reduced MTS is a colored formazan product that can be measured at an absorbance of 490 nm. An appropriate density of cells from the cell lines MCF-7, SiMa, PC-12, 266.6, RWPE-1, and N2a, were plated into the wells of 96-well tissue culture plates containing 100 μL of an appropriate medium (Table 7), but without serum, and with or without 25 μg/mL of GT1b (Alexis Biochemicals, San Diego, Calif.). Cells were plated and incubated in a 37° C. incubator under 5% carbon dioxide until the cells differentiated, as assessed by standard and routine morphological criteria, such as growth arrest (approximately 3 days). The media was aspirated from each well and the differentiated cells were treated by replacing with fresh media containing 0 (untreated sample), 0.3125 nM, 1.25 nM, and 20 nM of a BoNT/A. After 24 hrs treatment, the cells were washed by aspirating the media and rinsing each well with 100 μL of 1×PBS. After washing, 100 μL of MTS solution was added to each well, incubated for 2 hours, and then the absorbance at 490 nm recorded with a 96-well plate reader. The quantity of formazan product as measured by the amount of 490 nm absorbance is directly proportional to the number of living cells in culture. A similar design can be employed to examine the effects of a TVEMP on cell viability.

[0348] The results show that a BoNT/A treatment decreased the metabolic activity in the cancerous cell lines tested (Table 17).

TABLE 17
Cell Metabolic Activity Assay

BoNT/A Concentration

| Cell Line | 0 nM | 0.3125 nM | 1.25 nM | 20 nM |
|---|---|---|---|---|
| MCF-7 | 1.60 | 1.45 | 1.41 | 1.30 |
| SiMa | 1.68 | 1.40 | 1.07 | 0.33 |
| PC-12 | 1.68 | 1.66 | 1.45 | 1.15 |
| 266.6 | 1.10 | 1.05 | 1.02 | 0.82 |
| RWPE-1 | 0.99 | 1.01 | 0.89 | 0.67 |
| N2a | 1.63 | 1.50 | 1.43 | 1.28 |

[0349] To further demonstrate that a botulinum toxin or TVEMP treatment could decrease cancer cell viability, a CELLTITER GLO® Luminescent Cell Viability Assay (Promega Corp., Madison, Wis.) was performed according to the manufacturer's instructions. In this assay, cell viability is quantified on the bases of the presence of ATP, which signals the presence of metabolically active cells. A decreased in ATP content corresponds to less metabolically active cells. Cells from the cell lines LNCaP, J82, T24, and DU-145 were differentiated as described above. The media was aspirated from each well and the differentiated cells were treated by replacing with fresh media containing either 1) 0 (untreated sample), 25 nM, and 50 nM of a BoNT/A; or 2) 0 (untreated sample), 250 nM, and 500 nM of a Noci-LH_{N}/A TVEMP. After 24 hrs treatment, the cells were washed by aspirating the media and rinsing each well with 100 μL of 1×PBS. After washing, 100 μL of CELLTITER GLO® reagent was added to each well. After ten minutes incubation at room temperature, the sample luminescence was measured using a SpectraMAX L luminescence reader (Molecular Devices, Sunnyvale, Calif.). Assays were performed in triplicate and cell viability was noted every day for four or five days.

[0350] The data shows that decreased viability was observed in cells from both a DU-145 prostate carcinoma cell line and a J82 bladder carcinoma cell line after BoNT/A treatments (Table 18) or Noci-LH_{N}/A TVEMP treatments (Table 19).

TABLE 18
Cell Viability Assay for BoNT/A

| | BoNT/A Concentration | | | | | | | |
|---|---|---|---|---|---|---|---|---|
| | DU-145 | | | | J82 | | | |
| Time | 0 nM | 25 nM | 0 nM | 50 nM | 0 nM | 25 nM | 0 nM | 50 nM |
| Day 1 | 3356 | 3291 | 404219 | 301228 | 3077 | 2853 | 543436 | 318900 |
| | | (0.385) | | (0.325) | | (0.223) | | (0.398) |
| Day 2 | 2360 | 2433 | 649139 | 394645 | 5211 | 4646 | 741025 | 493817 |
| | | (0.433) | | (0.174) | | (0.016) | | (0.129) |
| Day 4 | ND | ND | 1277552 | 809182 | ND | ND | 1242627 | 649797 |
| | | | | (0.058) | | | | (0.010) |
| Day 5 | 4823 | 2325 | ND | ND | 7384 | 4262 | ND | ND |
| | | (0.0001) | | | | (0.0001) | | |

P value indicating significant difference relative to non-treated control is listed in parenthesis.
ND, not determined

TABLE 19
Cell Viability Assay for Noci-LH_{N}/A TVEMP

| | Noci-LH_{N}/A TVEMP Concentration | | | | | | | |
|---|---|---|---|---|---|---|---|---|
| | DU-145 | | | | J82 | | | |
| Time | 0 nM | 250 nM | 0 nM | 500 nM | 0 nM | 250 nM | 0 nM | 500 nM |
| Day 1 | 3356 | 3630 | 404219 | 408023 | 3077 | 3189 | 543436 | 406420 |
| | | (0.087) | | (0.959) | | (0.223) | | (0.103) |
| Day 2 | 2360 | 2379 | 649139 | 622596 | 5211 | 4639 | 741025 | 677236 |
| | | (0.876) | | (0.802) | | (0.015) | | (0.581) |
| Day 4 | | | 1277552 | 1030346 | | | 1242627 | 854124 |
| | | | | (0.171) | | | | (0.020) |
| Day 5 | 4823 | 3595 | | | 7384 | 6349 | | |
| | | (0.0003) | | | | (0.009) | | |

P value indicating significant difference relative to non-treated control is listed in parenthesis.
ND, not determined

[0351] To determine whether a botulinum toxin or TVEMP treatment decreased cancer cell viability by an apoptotic process, the activity of Caspase-⅜ was measured in cell treated with BoNT/A. Cells from the cell lines LNCaP, J82, and T24 were differentiated as described above. The media was aspirated from each well and the differentiated cells were treated by replacing with fresh media containing either 1) 0 (untreated sample), 0.5 nM, 5 nM, and 50 nM of a BoNT/A; or 2) 0 (untreated sample), 1.6 nM, 16 nM, and 166 nM of a Noci-LH_{N}/A TVEMP. After 24 hrs treatment, the cells were washed by aspirating the media and rinsing each well with 100 μL of 1×PBS To measure cellular caspase 9 activity, 50 μL of CASPASE-GLO® 9 (Promega, Corp., Madison, Wis.) reagent was added to the culture media of each well. After 30 minute incubation at 37° C., the luminescence of each sample was measured using a Spectramax L luminometer (Molecular Devices, Sunnyvale, Calif.). T24 does not express SNAP-25 and should not be sensitive to treatment with BoNT/A or Noci-LH_{N}/A TVEMP.

[0352] The data shows that an effect on Caspase ⅜ activity was most prevalent in LNCaP cell after exposure to BoNT/A, indicating that LNCaP cell line viability decreases with BoNT/A treatment (Table 20). These data are supported by the cell viability assays measuring the number of live and dead cells in populations treated with BoNT/A (Table 18). Although cells from a J82 cell line did not show significant differences in Caspase ⅜ activity, this cell line did contain a higher amount of dead cells after BoNT/A or Noci-LH_{N}/A TVEMP treatments (Table 19). The reason for the observation of no caspase activity in J82 cells could be due to at least two possibilities: 1) the timing of BoNT/A treatment to detect Caspase ⅜ activity is different for J82 and LNCaP (e.g., Caspase ⅜ activation may had occur earlier in J82 cells); or 2) the cell death pathway for J82 is independent of Caspase ⅜.

TABLE 20
Caspase 3/8 Activity Assay

| | BoNT/A Concentration | | | | Noci-LH_{N}/A TVEMP | | | |
|---|---|---|---|---|---|---|---|---|
| Cell | | | | 50 | | | | 166 |
| Line | 0 nM | 0.5 nM | 5 nM | nM | 0 nM | 1.6 nM | 16 nM | nM |
| LNCaP | 270 | 283 | 239 | 572 | 218 | 232 | 233 | 263 |
| T24 | 656 | 612 | 634 | 646 | 637 | 602 | 623 | 617 |
| J82 | 235 | 146 | 256 | 194 | 132 | 133 | 103 | 98 |

[0353] To test whether cell death of cells treated with a botulinum toxin or TVEMP was directed by a process independent of Caspase ⅜ pathway, cells were assayed for the presence of cleaved nuclear poly (ADP-ribose) polymerase (PARP). PARP is a 116 kDa nuclear poly (ADP-ribose) polymerase and appears to be involved in DNA repair in response to environmental stress. This protein can be cleaved by many ICE-like caspases in vitro and is one of the main cleavage targets of Caspase-3 in vivo. In human PARP, the cleavage occurs between Asp214 and Gly215, which separates the PARP amino-terminal DNA binding domain (24 kDa) from the carboxy-terminal catalytic domain (89 kDa). PARP helps cells to maintain their viability; cleavage of PARP facilitates cellular disassembly and serves as a marker of cells undergoing apoptosis. To determine whether changes in cell viability are due to cells undergoing apoptosis, cells from the cell lines DU-145 and J82 were differentiated as described above. The media was aspirated from each well and the differentiated cells were treated by replacing with fresh media containing either 1) 0 (untreated sample) and 50 nM of a BoNT/A; or 2) 0 (untreated sample) and 500 nM of a Noci-LH_{N}/A TVEMP. After 48 hrs treatment, the cells were washed, harvested and Western blot analysis performed as described in Example 1, except an α-PARP antibodies were used as the primary antibody. Cells from both cell lines showed an increased of cleaved PARP after 2 days of Noci-LH_{N}/A TVEMP treatment. However, the presence of cleaved PARP was minimal in cells from both cell lines treated with a BoNT/A.

[0354] To conduct a human apoptosis protein array screen, cells from a DU-145 prostate cancer cell line were treated with a BoNT/A, harvested, and assayed as described above in Example 3. The results show that after treatment of cells from the DU-145 cell line with 50 nM BonT/A for 24 hours, most of apoptosis-related proteins remained unchanged when compared to control. There were only 10 apoptotic-related proteins where expression decreased from 1.5-fold to 2.4-fold (Table 21). A decreased in expression was noted in three anti-apoptotic proteins (Livin, survivin, and BCL-x), two cell cycle related proteins (Claspin and P27), antioxidant related protein (PON2), chaperone protein (clusterin) and two pro-apoptotic related proteins (Bax and Cytochrome C).

TABLE 21
Human Apoptosis Array in DU-145 Cell line

| | Mean Pixel density | | | |
|---|---|---|---|---|
| Analyte | Untreated | Treated | Fold Decrease | Function |
| Livin | 644.1 | 469.7 | 1.7 | Anti-apoptotic |
| Cytochrome c | 3423 | 1889 | 1.9 | Pro-apoptotic |
| XIAP | 10099 | 10045 | 1.0 | Anti-apoptotic |
| HTRA2/Omi | 7542 | 9368 | 0.8 | IAP antagonist |
| Clusterin | 1139 | 816 | 1.6 | Chaperones misfolded proteins |
| TNF rRI/TNFRSF1A | 2036 | 1467 | 1.5 | Activates NFkB |
| HSP70 | 7058 | 9669 | 0.7 | Stress response chaperone |
| Claspin | 6630 | 3390 | 2.0 | Cell cycle check point |
| Survivin | 8717 | 3739 | 2.4 | Anti-apoptotic |
| HSP60 | 945 | 855 | 1.2 | Stress response chaperone |
| cIAP-2 | 2862 | 3156 | 0.9 | Inhibitor of Apoptosis (IAP) |
| SMAC/Diablo | 8379 | 7132 | 1.2 | Promotes caspase activation by interaction |
| | | | | with IAP proteins |
| HSP27 | 5716 | 5683 | 1.0 | Stress response chaperone |
| cIAP-1 | 16916 | 15297 | 1.1 | Inhibitor of Apoptosis (IAP) |
| Phospho-Rad17 | 1646 | 999 | 1.8 | cell cycle check point |
| HO-2/HMOX2 | 8930 | 8934 | 1.0 | Microsomal enzyme |
| Catalase | 18742 | 18710 | 1.0 | Prevent cell damage from oxidative stress |
| p53 | 19134 | 22007 | 0.9 | Induces apoptosis |
| HO-1/HMOX1/HSP32 | 9878 | 11333 | 0.9 | Microsomal enzyme |
| Cleaved Caspase-3 | 715 | 614 | 1.3 | Downstream mediator |
| | | | | of apoptotis |
| p53 | 8623 | 11225 | 0.8 | Induces apoptosis |
| HIF-1 alpha | 6832 | 6703 | 1.0 | Binds to hypoxia response elements |
| Pro-Caspase-3 | 36318 | 42668 | 0.9 | Downstream mediator |
| | | | | of apoptotis |
| p53 | 20019 | 24725 | 0.8 | Induces apoptosis |
| Fas/TNFSF6 | 34978 | 35878 | 1.0 | Induces apoptosis |
| Bcl-x | 571 | 445 | 1.6 | Anti-apoptotic |
| p27 | 1293 | 852 | 1.7 | Cell cycle check point |
| FADD | 9996 | 8647 | 1.2 | Induces apoptosis |
| Bcl-2 | 967 | 1427 | 0.7 | Anti-apoptotic |
| p21 | 1062 | 1029 | 1.1 | Blocks cell cycle |
| TRAIL R2/DR5 | 25985 | 21477 | 1.2 | Induces apoptosis |
| Bax | 2097 | 1436 | 1.6 | Apoptotic activator |
| PON2 | 2611 | 1784 | 1.5 | Antioxidant enzyme |
| TRAIL R1 | 28443 | 20518 | 1.4 | Induces apoptosis |
| Bad | 5097 | 5932 | 0.9 | Pro-apoptotic |

[0355] Taken together, the experiments described in this Example show that treatment with a BoNT/A or TVEMP results in decreased metabolic activity and decreased cells viability. Events related to apoptosis were identified following light chain delivery into cancer cells, Caspase ⅜ activity was observed after treatment with BoNT/A in LNCaP cells as well as increased cleavage of PARP, the main substrate for Caspase 3 was observed after treatment with Noci-LH_{N}/A TVEMP in the DU-145 and J82 cells, showing that cells are pushed towards apoptosis after treatment with a BoNT/A or a TVEMP. Overall, the amounts of proteins involved with apoptosis in the cell lysates did not change after treatment with BoNT/A. Most of the pro-apoptotic and anti-apoptotic proteins exert their function by translocating from the cytoplasm to the mitochondria without changes in total protein amount. The small changes detected may be a short term response of the tumor cells to the inhibition of exocytosis and the interference with the input from the autocrine or paracrine loops that the cancer cell needs to survive. Eventually these cells will be pushed into apoptosis due to the lack of survival signals.

### Example 5

### Treatment of Cancer Associated with Aberrant New Blood Vessel Formation

[0356] The following examples are provided by way of describing specific embodiments without intending to limit the scope of the invention in any way.

[0357] A physician examines a patient who complains of a lump in her left breast and diagnoses her with breast cancer. The patient is treated by local administration a composition comprising a TVEMP as disclosed herein in the vicinity of the affected area. The patient's condition is monitored and after about 1-7 days after treatment, the physician notes that the growth of the malignant tumor has slowed down. At one and three month check-ups, the physician determines that there is a decrease in the blood vessel architecture associated with the tumor as well as a decrease in the size of the tumor. This reduction in tumor size and/or aberrant new blood vessel formation indicate successful treatment with the composition comprising a TVEMP. In addition, a systemic administration of a composition comprising a TVEMP as disclosed herein could also be used to administer a disclosed TVEMP to treat the breast cancer.

[0358] A physician examines a patient who complains of difficulty in urinating and diagnoses him with prostate cancer. The patient is treated systemically by intravenous administration a composition comprising a TVEMP as disclosed herein. The patient's condition is monitored and after about 1-7 days after treatment, the physician determines that the size of the prostate has become smaller. At one and three month check-ups, the physician determines that there is a decrease in the blood vessel architecture associated with the tumor as well as a decrease in the size of the tumor and that serum PSA levels are within the normal range. This reduction in tumor size and/or reduces serum PSA levels indicates successful treatment with the composition comprising a TVEMP. In addition, a local administration of a composition comprising a TVEMP as disclosed herein could also be used to administer a disclosed TVEMP to treat the prostate cancer.

[0359] A physician examines a patient who complains of wheezing when he breathes and diagnoses him with lung cancer. The patient is treated systemically by intravenous administration a composition comprising a TVEMP as disclosed herein. The patient's condition is monitored and after about 1-7 days after treatment, the physician notes that the growth of the malignant tumor has slowed down. At one and three month check-ups, the patient indicates that his breathing is normal and the physician determines that there is a decrease in the blood vessel architecture associated with the tumor as well as a decrease in the size of the tumor. The normal breathing, reduction in tumor size and/or aberrant new blood vessel formation indicate successful treatment with the composition comprising a TVEMP. In addition, systemic administration could also be used to administer a disclosed TVEMP to treat cancer. In addition, administration by inhalation could also be used to administer a disclosed TVEMP to treat the lung cancer.

[0360] A physician examines a patient who complains of pelvic pain and diagnoses her with bladder cancer. The patient is treated by local administration a composition comprising a TVEMP as disclosed herein in the vicinity of the affected area. The patient's condition is monitored and after about 1-7 days after treatment, the physician notes that the growth of the malignant tumor has slowed down. At one and three month check-ups, the patient indicates that the pelvic pain is gone and the physician determines that there is a decrease in the blood vessel architecture associated with the tumor as well as a decrease in the size of the tumor. The reduction in pain, tumor size and/or aberrant new blood vessel formation indicate successful treatment with the composition comprising a TVEMP. In addition, a systemic administration of a composition comprising a TVEMP as disclosed herein could also be used to administer a disclosed TVEMP to treat the bladder cancer.

[0361] A physician examines a patient who complains of abdominal pain and diagnoses her with colon cancer. The patient is treated by systemically by intravenous administration of a composition comprising a TVEMP as disclosed herein. The patient's condition is monitored and after about 1-7 days after treatment, and the physician notes that the growth of the malignant tumor has slowed down. At one and three month check-ups, the patient indicates that the abdominal pain is gone and the physician determines that there is a decrease in the blood vessel architecture associated with the tumor as well as a decrease in the size of the tumor. The reduced pain, tumor size and/or aberrant new blood vessel formation indicate successful treatment with the composition comprising a TVEMP. In addition, a local administration of a composition comprising a TVEMP as disclosed herein could also be used to administer a disclosed TVEMP to treat the colon cancer.

[0362] A physician examines a patient who complains of headaches and dizziness and diagnoses him with a neuroblastoma. The patient is treated by intracranial administration a composition comprising a TVEMP as disclosed herein in the vicinity of the affected area. The patient's condition is monitored and after about 1-7 days after treatment, the physician determines that there is a decrease in the blood vessel architecture associated with the tumor as well as a decrease in the size of the tumor. At one and three month check-ups, the patient indicates that he no longer suffers from headaches and dizziness and the physician determines that there is a decrease in the blood vessel architecture associated with the tumor as well as a decrease in the size of the tumor. The disappearance of headache, dizziness and/or the reduction in tumor size and/or aberrant new blood vessel formation indicate successful treatment with the composition comprising a TVEMP.

### Example 6

[0363] Treatment of Disease or Disorder Associated with Aberrant New Blood Vessel Formation

[0364] The following examples are provided by way of describing specific embodiments without intending to limit the scope of the invention in any way.

[0365] A physician examines a patient who complains of poor vision and diagnoses her with age-related macular degeneration. The patient is treated by local administration a composition comprising a TVEMP as disclosed herein in the vicinity of the affected area. The patient's condition is monitored and after about 1-7 days after treatment, the physician notes that the growth of new blood vessels has slowed down. At one and three month check-ups, the physician determines that the architecture of the blood vessels in the retina appears normal and the patient's vision improves. This reduction in aberrant new blood vessel formation indicates successful treatment with the composition comprising a TVEMP. A similar approach can be used to treat an individual suffering from a retinopathy, a different macula degeneration, or a choroidal neovascularization.

[0366] A physician examines a patient who complains of chest pains and diagnoses him with arteriosclerosis and high blood pressure. The patient is treated by local administration a composition comprising a TVEMP as disclosed herein in the vicinity of the affected area. The patient's condition is monitored and after about 1-7 days after treatment, the physician notes that the patient's blood pressure has dropped. At one and three month check-ups, the physician determines that there is a decrease in vessel blockage, a further lowering of the patient's blood pressure, and that the frequency of chest pains is lower. This reduction in vessel blockage, blood pressure and chest pain indicates successful treatment with the composition comprising a TVEMP. In addition, a systemic administration of a composition comprising a TVEMP as disclosed herein could also be used to administer a disclosed TVEMP to treat arteriosclerosis and high blood pressure.

[0367] A physician examines a patient who complains of painful skin itching and diagnoses her with psoriasis. The patient is treated by topical administration of a composition comprising a TVEMP as disclosed herein. The patient's condition is monitored and after about 1-7 days after treatment, the physician determines that the extent of psoriasis is reduced slightly. At one and three month check-ups, the patient indicates that he no longer suffers any itching and the physician determines that the psoriasis is gone. The reduction in itching and disappearance of the psoriasis indicates successful treatment with the composition comprising a TVEMP. In addition, a systemic or injection-based administration of a composition comprising a TVEMP as disclosed herein could also be used to administer a disclosed TVEMP to treat the psoriasis.

[0368] A physician examines a patient who complains of wheezing when she breathes and diagnoses her with idiopathic pulmonary fibrosis. The patient is treated systemically by intravenous administration a composition comprising a TVEMP as disclosed herein. The patient's condition is monitored and after about 1-7 days after treatment, the physician notes that the patient is not wheezing as often. At one and three month check-ups, the patient indicates that her breathing is normal and the physician determines that there is a decrease in the blood vessel architecture associated with pulmonary fibrosis. The normal breathing and/or the reduction in aberrant new blood vessel formation indicate successful treatment with the composition comprising a TVEMP. In addition, systemic administration could also be used to administer a disclosed TVEMP to treat idiopathic pulmonary fibrosis. In addition, administration by inhalation could also be used to administer a disclosed TVEMP to treat the idiopathic pulmonary fibrosis.

[0369] A physician examines a patient who complains of pain in his joints and diagnoses him with a rheumatoid arthritis. The patient is treated by systemic administration of a composition comprising a TVEMP as disclosed herein. The patient's condition is monitored and after about 1-7 days after treatment, the physician determines that there is a decrease in the patient's joint pain. At one and three month check-ups, the patient indicates that he no longer feels joint pain and the physician determines that there is a decrease in the blood vessel architecture associated with joints that gave the patient pain. The disappearance of pain and/or reduction in aberrant new blood vessel formation indicate successful treatment with the composition comprising a TVEMP.

[0370] In closing, it is to be understood that although aspects of the present specification have been described with reference to the various embodiments, one skilled in the art will readily appreciate that the specific examples disclosed are only illustrative of the principles of the subject matter disclosed herein. Therefore, it should be understood that the disclosed subject matter is in no way limited to a particular methodology, protocol, and/or reagent, etc., described herein. As such, various modifications or changes to or alternative configurations of the disclosed subject matter can be made in accordance with the teachings herein without departing from the spirit of the present specification. Lastly, the terminology used herein is for the purpose of describing particular embodiments only, and is not intended to limit the scope of the present invention, which is defined solely by the claims. Accordingly, the present invention is not limited to that precisely as shown and described.

[0371] Certain embodiments of this invention are described herein, including the best mode known to the inventors for carrying out the invention. Of course, variations on these described embodiments will become apparent to those of ordinary skill in the art upon reading the foregoing description. The inventor expects skilled artisans to employ such variations as appropriate, and the inventors intend for the invention to be practiced otherwise than specifically described herein. Accordingly, this invention includes all modifications and equivalents of the subject matter recited in the claims appended hereto as permitted by applicable law. Moreover, any combination of the above-described elements in all possible variations thereof is encompassed by the invention unless otherwise indicated herein or otherwise clearly contradicted by context.

[0372] Groupings of alternative elements or embodiments of the invention disclosed herein are not to be construed as limitations. Each group member may be referred to and claimed individually or in any combination with other members of the group or other elements found herein. It is anticipated that one or more members of a group may be included in, or deleted from, a group for reasons of convenience and/or patentability. When any such inclusion or deletion occurs, the specification is deemed to contain the group as modified thus fulfilling the written description of all Markush groups used in the appended claims.

[0373] Unless otherwise indicated, all numbers expressing quantities of ingredients, properties such as molecular weight, reaction conditions, and so forth used in the specification and claims are to be understood as being modified in all instances by the term “about.” As used herein, the term “about” means that the item, parameter or term so qualified encompasses a range of plus or minus ten percent above and below the value of the stated item, parameter or term. Accordingly, unless indicated to the contrary, the numerical parameters set forth in the specification and attached claims are approximations that may vary depending upon the desired properties sought to be obtained by the present invention. At the very least, and not as an attempt to limit the application of the doctrine of equivalents to the scope of the claims, each numerical parameter should at least be construed in light of the number of reported significant digits and by applying ordinary rounding techniques. Notwithstanding that the numerical ranges and parameters setting forth the broad scope of the invention are approximations, the numerical values set forth in the specific examples are reported as precisely as possible. Any numerical value, however, inherently contains certain errors necessarily resulting from the standard deviation found in their respective testing measurements.

[0374] The terms “a,” “an,” “the” and similar referents used in the context of describing the invention (especially in the context of the following claims) are to be construed to cover both the singular and the plural, unless otherwise indicated herein or clearly contradicted by context. Recitation of ranges of values herein is merely intended to serve as a shorthand method of referring individually to each separate value falling within the range. Unless otherwise indicated herein, each individual value is incorporated into the specification as if it were individually recited herein. All methods described herein can be performed in any suitable order unless otherwise indicated herein or otherwise clearly contradicted by context. The use of any and all examples, or exemplary language (e.g., “such as”) provided herein is intended merely to better illuminate the invention and does not pose a limitation on the scope of the invention otherwise claimed. No language in the specification should be construed as indicating any non-claimed element essential to the practice of the invention.

[0375] Specific embodiments disclosed herein may be further limited in the claims using consisting of or consisting essentially of language. When used in the claims, whether as filed or added per amendment, the transition term “consisting of” excludes any element, step, or ingredient not specified in the claims. The transition term “consisting essentially of” limits the scope of a claim to the specified materials or steps and those that do not materially affect the basic and novel characteristic(s). Embodiments of the invention so claimed are inherently or expressly described and enabled herein.

[0376] All patents, patent publications, and other publications referenced and identified in the present specification are individually and expressly incorporated herein by reference in their entirety for the purpose of describing and disclosing, for example, the compositions and methodologies described in such publications that might be used in connection with the present invention. These publications are provided solely for their disclosure prior to the filing date of the present application. Nothing in this regard should be construed as an admission that the inventors are not entitled to antedate such disclosure by virtue of prior invention or for any other reason. All statements as to the date or representation as to the contents of these documents is based on the information available to the applicants and does not constitute any admission as to the correctness of the dates or contents of these documents.

1. A method of treating a disease or disorder associated with aberrant new blood vessel formation in a mammal, the method comprising the step of administering to the mammal in need thereof a therapeutically effective amount of a composition including a TVEMP comprising a targeting domain, a Clostridial toxin translocation domain and a Clostridial toxin enzymatic domain, and an exogenous protease cleavage site, wherein administration of the composition decreases a symptom of a disease or disorder associated with aberrant new blood vessel formation.

2. The method of claim 1, wherein the TVEMP comprises a linear amino-to-carboxyl single polypeptide order of 1) the Clostridial toxin enzymatic domain, the exogenous protease cleavage site, the Clostridial toxin translocation domain, the targeting domain, 2) the Clostridial toxin enzymatic domain, the exogenous protease cleavage site, the targeting domain, the Clostridial toxin translocation domain, 3) the targeting domain, the Clostridial toxin translocation domain, the exogenous protease cleavage site and the Clostridial toxin enzymatic domain, 4) the targeting domain, the Clostridial toxin enzymatic domain, the exogenous protease cleavage site, the Clostridial toxin translocation domain, 5) the Clostridial toxin translocation domain, the exogenous protease cleavage site, the Clostridial toxin enzymatic domain and the targeting domain, or 6) the Clostridial toxin translocation domain, the exogenous protease cleavage site, the targeting domain and the Clostridial toxin enzymatic domain.

3. The method of claim 1, wherein the targeting domain is an apelin targeting domain, an anthrax protective antigen (APA) targeting domain, an angiogenic factor with G patch and FHA domain 1 (AGGF1) targeting domain, an angiopoietin targeting domain, an angiostatin targeting domain, an angiogenin targeting domain, an endothelin targeting domain, an endothelial cell-specific molecule (ECSM) targeting domain, an ephrin targeting domain, an erythropoietin targeting domain, a hepatocyte growth factor (HGF) targeting domain, a netrin targeting domain, a brain specific angiogenesis inhibitor (BSAI) targeting domain, a Delta-like (DII) targeting domain, a jagged targeting domain, a semaphorin (Sema) targeting domain, a thrombospondin targeting domain, a chondromodulin targeting domain, a 16 kDa prolactin fragment targeting domain, a granulocyte macrophage-colony stimulating factor (GM-CSF) targeting domain, an Interferon-α (IFN-α) targeting domain, a pigment epithelium-derived factor (PEDF) targeting domain, a troponin targeting domain, a Vasohibin (VASH) targeting domain, a Urocortin (Ucn) targeting domain, a C-motif cytokine ligand targeting domain, a C—C-motif cytokine ligand targeting domain, a C—X—C-motif cytokine ligand targeting domain, and an endothelial-monocyte activating polypeptide (EMAP) targeting domain.

4. The method of claim 1, wherein the Clostridial toxin translocation domain is a BoNT/A translocation domain, a BoNT/B translocation domain, a BoNT/C1 translocation domain, a BoNT/D translocation domain, a BoNT/E translocation domain, a BoNT/F translocation domain, a BoNT/G translocation domain, a TeNT translocation domain, a BaNT translocation domain, or a BuNT translocation domain.

5. The method of claim 1, wherein the Clostridial toxin enzymatic domain is a BoNT/A enzymatic domain, a BoNT/B enzymatic domain, a BoNT/C1 enzymatic domain, a BoNT/D enzymatic domain, a BoNT/E enzymatic domain, a BoNT/F enzymatic domain, a BoNT/G enzymatic domain, a TeNT enzymatic domain, a BaNT enzymatic domain, or a BuNT enzymatic domain.

6. The method of claim 1, wherein the exogenous protease cleavage site is a plant papain cleavage site, an insect papain cleavage site, a crustacian papain cleavage site, an enterokinase cleavage site, a human rhinovirus 3C protease cleavage site, a human enterovirus 3C protease cleavage site, a tobacco etch virus protease cleavage site, a Tobacco Vein Mottling Virus cleavage site, a subtilisin cleavage site, a hydroxylamine cleavage site, or a Caspase 3 cleavage site.

7. The method of claim 1, wherein the disease or disorder associated with aberrant new blood vessel formation is a retinopathy, a macula degeneration, a choroidal neovascularization, an atherosclerosis, a coronary atherosclerotic plaque formation, an endometriosis, an idiopathic pulmonary fibrosis, chronic inflammatory/fibroproliferative disorder, a rheumatoid arthritis, a psoriasis, or a cancer.

8. A TVEMP comprising a targeting domain, a Clostridial toxin translocation domain and a Clostridial toxin enzymatic domain, and an exogenous protease cleavage site.

9. The TVEMP of claim 8, wherein the TVEMP comprises a linear amino-to-carboxyl single polypeptide order of 1) the Clostridial toxin enzymatic domain, the exogenous protease cleavage site, the Clostridial toxin translocation domain, the targeting domain, 2) the Clostridial toxin enzymatic domain, the exogenous protease cleavage site, the targeting domain, the Clostridial toxin translocation domain, 3) the targeting domain, the Clostridial toxin translocation domain, the exogenous protease cleavage site and the Clostridial toxin enzymatic domain, 4) the targeting domain, the Clostridial toxin enzymatic domain, the exogenous protease cleavage site, the Clostridial toxin translocation domain, 5) the Clostridial toxin translocation domain, the exogenous protease cleavage site, the Clostridial toxin enzymatic domain and the targeting domain, or 6) the Clostridial toxin translocation domain, the exogenous protease cleavage site, the targeting domain and the Clostridial toxin enzymatic domain.

10. The TVEMP of claim 8, wherein the targeting domain is an apelin targeting domain, an anthrax protective antigen (APA) targeting domain, an angiogenic factor with G patch and FHA domain 1 (AGGF1) targeting domain, an angiopoietin targeting domain, an angiostatin targeting domain, an angiogenin targeting domain, an endothelin targeting domain, an endothelial cell-specific molecule (ECSM) targeting domain, an ephrin targeting domain, an erythropoietin targeting domain, a hepatocyte growth factor (HGF) targeting domain, a netrin targeting domain, a brain specific angiogenesis inhibitor (BSAI) targeting domain, a Delta-like (DII) targeting domain, a jagged targeting domain, a semaphorin (Sema) targeting domain, a thrombospondin targeting domain, a chondromodulin targeting domain, a 16 kDa prolactin fragment targeting domain, a granulocyte macrophage-colony stimulating factor (GM-CSF) targeting domain, an Interferon-α (IFN-α) targeting domain, a pigment epithelium-derived factor (PEDF) targeting domain, a troponin targeting domain, a Vasohibin (VASH) targeting domain, a Urocortin (Ucn) targeting domain, a C-motif cytokine ligand targeting domain, a C—C-motif cytokine ligand targeting domain, a C—X—C-motif cytokine ligand targeting domain, and an endothelial-monocyte activating polypeptide (EMAP) targeting domain.

11. The TVEMP of claim 8, wherein the Clostridial toxin translocation domain is a BoNT/A translocation domain, a BoNT/B translocation domain, a BoNT/C1 translocation domain, a BoNT/D translocation domain, a BoNT/E translocation domain, a BoNT/F translocation domain, a BoNT/G translocation domain, a TeNT translocation domain, a BaNT translocation domain, or a BuNT translocation domain.

12. The TVEMP of claim 8, wherein the Clostridial toxin enzymatic domain is a BoNT/A enzymatic domain, a BoNT/B enzymatic domain, a BoNT/C1 enzymatic domain, a BoNT/D enzymatic domain, a BoNT/E enzymatic domain, a BoNT/F enzymatic domain, a BoNT/G enzymatic domain, a TeNT enzymatic domain, a BaNT enzymatic domain, or a BuNT enzymatic domain.

13. The TVEMP of claim 8, wherein the exogenous protease cleavage site is a plant papain cleavage site, an insect papain cleavage site, a crustacian papain cleavage site, an enterokinase cleavage site, a human rhinovirus 3C protease cleavage site, a human enterovirus 3C protease cleavage site, a tobacco etch virus protease cleavage site, a Tobacco Vein Mottling Virus cleavage site, a subtilisin cleavage site, a hydroxylamine cleavage site, or a Caspase 3 cleavage site.

14. A composition comprising a TVEMP of claim 8.

15. The composition of claim 14, wherein the composition is a pharmaceutical composition.

The application's sequence listing, which the Patent Office published only in electronic form, follows.

SEQUENCE LISTING (389 sequences)

SEQ ID NO: 1 - protein, 1296 aa, Clostridium botulinum A1
MPFVNKQFNYKDPVNGVDIAYIKIPNAGQMQPVKAFKIHNKIWVIPERDTFTNPEEGDLNPPPEAKQVPVSYYDSTYLSTDNEKDNYLKGVTKLFERIYSTDLGRMLLTSIVRGIPFWGGSTIDTELKVIDTNCINVIQPDGSYRSEELNLVIIGPSADIIQFECKSFGHEVLNLTRNGYGSTQYIRFSPDFTFGFEESLEVDTNPLLGAGKFATDPAVTLAHELIHAGHRLYGIAINPNRVFKVNTNAYYEMSGLEVSFEELRTFGGHDAKFIDSLQENEFRLYYYNKFKDIASTLNKAKSIVGTTASLQYMKNVFKEKYLLSEDTSGKFSVDKLKFDKLYKMLTEIYTEDNFVKFFKVLNRKTYLNFDKAVFKINIVPKVNYTIYDGFNLRNTNLAANFNGQNTEINNMNFTKLKNFTGLFEFYKLLCVRGIITSKTKSLDKGYNKALNDLCIKVNNWDLFFSPSEDNFTNDLNKGEEITSDTNIEAAEENISLDLIQQYYLTFNFDNEPENISIENLSSDIIGQLELMPNIERFPNGKKYELDKYTMFHYLRAQEFEHGKSRIALTNSVNEALLNPSRVYTFFSSDYVKKVNKATEAAMFLGWVEQLVYDFTDETSEVSTTDKIADITIIIPYIGPALNIGNMLYKDDFVGALIFSGAVILLEFIPEIAIPVLGTFALVSYIANKVLTVQTIDNALSKRNEKWDEVYKYIVTNWLAKVNTQIDLIRKKMKEALENQAEATKAIINYQYNQYTEEEKNNINFNIDDLSSKLNESINKAMININKFLNQCSVSYLMNSMIPYGVKRLEDFDASLKDALLKYIYDNRGTLIGQVDRLKDKVNNTLSTDIPFQLSKYVDNQRLLSTFTEYIKNIINTSILNLRYESNHLIDLSRYASKINIGSKVNFDPIDKNQIQLFNLESSKIEVILKNAIVYNSMYENFSTSFWIRIPKYFNSISLNNEYTIINCMENNSGWKVSLNYGEIIWTLQDTQEIKQRVVFKYSQMINISDYINRWIFVTITNNRLNNSKIYINGRLIDQKPISNLGNIHASNNIMFKLDGCRDTHRYIWIKYFNLFDKELNEKEIKDLYDNQSNSGILKDFWGDYLQYDKPYYMLNLYDPNKYVDVNNVGIRGYMYLKGPRGSVMTTNIYLNSSLYRGTKFIIKKYASGNKDNIVRNNDRVYINVVVKNKEYRLATNASQAGVEKILSALEIPDVGNLSQVVVMKSKNDQGITNKCKMNLQDNNGNDIGFIGFHQFNNIAKLVASNWYNRQIERSSRTLGCSWEFIPVDDGWGERPL

SEQ ID NO: 2 - protein, 1296 aa, Clostridium botulinum A2
MPFVNKQFNYKDPVNGVDIAYIKIPNAGQMQPVKAFKIHNKIWVIPERDTFTNPEEGDLNPPPEAKQVPVSYYDSTYLSTDNEKDNYLKGVTKLFERIYSTDLGRMLLTSIVRGIPFWGGSTIDTELKVIDTNCINVIQPDGSYRSEELNLVIIGPSADIIQFECKSFGHDVLNLTRNGYGSTQYIRFSPDFTFGFEESLEVDTNPLLGAGKFATDPAVTLAHELIHAEHRLYGIAINPNRVFKVNTNAYYEMSGLEVSFEELRTFGGHDAKFIDSLQENEFRLYYYNKFKDVASTLNKAKSIIGTTASLQYMKNVFKEKYLLSEDTSGKFSVDKLKFDKLYKMLTEIYTEDNFVNFFKVINRKTYLNFDKAVFRINIVPDENYTIKDGFNLKGANLSTNFNGQNTEINSRNFTRLKNFTGLFEFYKLLCVRGIIPFKTKSLDEGYNKALNDLCIKVNNWDLFFSPSEDNFTNDLDKVEEITADTNIEAAEENISLDLIQQYYLTFDFDNEPENISIENLSSDIIGQLEPMPNIERFPNGKKYELDKYTMFHYLRAQEFEHGDSRIILTNSAEEALLKPNVAYTFFSSKYVKKINKAVEAFMFLNWAEELVYDFTDETNEVTTMDKIADITIIVPYIGPALNIGNMLSKGEFVEAIIFTGVVAMLEFIPEYALPVFGTFAIVSYIANKVLTVQTINNALSKRNEKWDEVYKYTVTNWLAKVNTQIDLIREKMKKALENQAEATKAIINYQYNQYTEEEKNNINFNIDDLSSKLNESINSAMININKFLDQCSVSYLMNSMIPYAVKRLKDFDASVRDVLLKYIYDNRGTLVLQVDRLKDEVNNTLSADIPFQLSKYVDNKKLLSTFTEYIKNIVNTSILSIVYKKDDLIDLSRYGAKINIGDRVYYDSIDKNQIKLINLESSTIEVILKNAIVYNSMYENFSTSFWIKIPKYFSKINLNNEYTIINCIENNSGWKVSLNYGEIIWTLQDNKQNIQRVVFKYSQMVNISDYINRWIFVTITNNRLTKSKIYINGRLIDQKPISNLGNIHASNKIMFKLDGCRDPRRYIMIKYFNLFDKELNEKEIKDLYDSQSNSGILKDFWGNYLQYDKPYYMLNLFDPNKYVDVNNIGIRGYMYLKGPRGSVVTTNIYLNSTLYEGTKFIIKKYASGNEDNIVRNNDRVYINVVVKNKEYRLATNASQAGVEKILSALEIPDVGNLSQVVVMKSKDDQGIRNKCKMNLQDNNGNDIGFIGFHLYDNIAKLVASNWYNRQVGKASRTFGCSWEFIPVDDGWGESSL

SEQ ID NO: 3 - protein, 1292 aa, Clostridium botulinum A3
MPFVNKPFNYRDPGNGVDIAYIKIPNAGQMQPVKAFKIHEGVWVIPERDTFTNPEEGDLNPPPEAKQVPVSYYDSTYLSTDNEKDNYLKGVIKLFDRIYSTGLGRMLLSFIVKGIPFWGGSTIDTELKVIDTNCINVIEPGGSYRSEELNLVITGPSADIIQFECKSFGHDVFNLTRNGYGSTQYIRFSPDFTFGFEESLEVDTNPLLGAGTFATDPAVTLAHELIHAAHRLYGIAINPNRVLKVKTNAYYEMSGLEVSFEELRTFGGNDTNFIDSLWQKKFSRDAYDNLQNIARILNEAKTIVGTTTPLQYMKNIFIRKYFLSEDASGKISVNKAAFKEFYRVLTRGFTELEFVNPFKVINRKTYLNFDKAVFRINIVPDENYTINEGFNLEGANSNGQNTEINSRNFTRLKNFTGLFEFYKLLCVRGIIPFKTKSLDEGYNKALNYLCIKVNNWDLFFSPSEDNFTNDLDKVEEITADTNIEAAEENISSDLIQQYYLTFDFDNEPENISIENLSSDIIGQLEPMPNIERFPNGKKYELDKYTMFHYLRAQEFEHGDSRIILTNSAEEALLKPNVAYTFFSSKYVKKINKAVEAVIFLSWAEELVYDFTDETNEVTTMDKIADITIIVPYIGPALNIGNMVSKGEFVEAILFTGVVALLEFIPEYSLPVFGTFAIVSYIANKVLTVQTINNALSKRNEKWDEVYKYTVTNWLAKVNTQIDLIREKMKKALENQAEATRAIINYQYNQYTEEEKNNINFNIDDLSSKLNRSINRAMININKFLDQCSVSYLMNSMIPYAVKRLKDFDASVRDVLLKYIYDNRGTLILQVDRLKDEVNNTLSADIPFQLSKYVNDKKLLSTFTEYIKNIVNTSILSIVYKKDDLIDLSRYGAKINIGDRVYYDSIDKNQIKLINLESSTIEVILKNAIVYNSMYENFSTSFWIKIPKYFSKINLNNEYTIINCIENNSGWKVSLNYGEIIWTLQDNKQNIQRVVFKYSQMVNISDYINRWMFVTITNNRLTKSKIYINGRLIDQKPISNLGNIHASNKIMFKLDGCRDPRRYIMIKYFNLFDKELNEKEIKDLYDSQSNPGILKDFWGNYLQYDKPYYMLNLFDPNKYVDVNNIGIRGYMYLKGPRGSVMTTNIYLNSTLYMGTKFIIKKYASGNEDNIVRNNDRVYINVVVKNKEYRLATNASQAGVEKILSALEIPDVGNLSQVVVMKSKDDQGIRNKCKMNLQDNNGNDIGFVGFHLYDNIAKLVASNWYNRQVGKASRTFGCSWEFIPVDDGWGESSL

SEQ ID NO: 4 - protein, 1296 aa, Clostridium botulinum A4
MPLVNQQINYYDPVNGVDIAYIKIPNAGKMQPVKAFKIHNKVWVIPERDIFTNPEEVDLNPPPEAKQVPISYYDSAYLSTDNEKDNYLKGVIKLFERIYSTDLGRMLLISIVRGIPFWGGGKIDTELKVIDTNCINIIQLDDSYRSEELNLAIIGPSANIIESQCSSFRDDVLNLTRNGYGSTQYIRFSPDFTVGFEESLEVDTNPLLGAGKFAQDPAVALAHELIHAEHRLYGIAINTNRVFKVNTNAYYEMAGLEVSLEELITFGGNDAKFIDSLQKKEFSLYYYNKFKDIASTLNKAKSIVGTTASLQYMKNVFKEKYLLSEDATGKFLVDRLKFDELYKLLTEIYTEDNFVKFFKVLNRKTYLNFDKAVFKINIVPDVNYTIHDGFNLRNTNLAANFNGQNIEINNKNFDKLKNFTGLFEFYKLLCVRGIITSKTKSLDEGYNKALNELCIKVNNWDLFFSPSEDNFTNDLDKVEEITSDTNIEAAEENISLDLIQQYYLNFNFDNEPENTSIENLSSDIIGQLEPMPNIERFPNGKKYELNKYTMFHYLRAQEFKHSNSRIILTNSAKEALLKPNIVYTFFSSKYIKAINKAVEAVTFVNWIENLVYDFTDETNEVSTMDKIADITIVIPYIGPALNIGNMIYKGEFVEAIIFSGAVILLEIVPEIALPVLGTFALVSYVSNKVLTVQTIDNALSKRNEKWDEVYKYIVTNWLAIVNTQINLIREKMKKALENQAEATKAIINYQYNQYTEEEKNNINFNIDDLSSKLNESINSAMININKFLDQCSVSYLMNSMIPYAVKRLKDFDASVRDVLLKYIYDNRGTLIGQVNRLKDKVNNTLSADIPFQLSKYVDNKKLLSTFTEYIKNITNASILSIVYKDDDLIDLSRYGAEIYNGDKVYYNSIDKNQIRLINLESSTIEVILKKAIVYNSMYENFSTSFWIRIPKYFNSISLNNEYTIINCMENNSGWKVSLNYGEIIWTFQDTQEIKQRVVFKYSQMINISDYINRWIFVTITNNRITKSKIYINGRLIDQKPISNLGNIHASNKIMFKLDGCRDPHRYIVIKYFNLFDKELSEKEIKDLYDNQSNSGILKDFWGDYLQYDKSYYMLNLYDPNKYVDVNNVGIRGYMYLKGPRDNVMTTNIYLNSSLYMGTKFIIKKYASGNKDNIVRNNDRVYINVVVKNKEYRLATNASQAGVEKILSALEIPDVGNLSQVVVMKSKNDQGITNKCKMNLQDNNGNDIGFIGFHQFNNIAKLVASNWYNRQIERSSRTLGCSWEFIPVDDGWRERPL

SEQ ID NO: 5 - protein, 1296 aa, Clostridium botulinum A5
MPFVNKQFNYKDPVNGVDIAYIKIPNAGQMQPVKAFKIHNKIWVIPERDTFTNPEEGDLNPPPEAKQVPVSYYDSTYLSTDNEKDNYLKGVTKLFERIYSTELGRMLLTSIVRGIPFWGGSTIDTELKVIDTNCINVIQPDGSYRSEELNLVIIGPSADIIQFECKSFGHDVLNLTRNGYGSTQYIRFSPDFTFGFEESLEVDTNPLLGAGKFATDPAVTLAHELIHAGHRLYGIAINPNRVFKVNTNAYYEMSGLEVSFEELRTFGEHDAKFIDSLQENEFRLYYYNKFKDIASTLNKAKSIVGTTASLQYMKNVFKEKYLLSEDTSGKFSVDKLKFDKLYKMLTEIYTEDNFVKFFKVLNRKTYLNFDKAVFKINIVPEVNYTIYDGFNLRNTNLAANFNGQNTEINNMNFTKLKNFTGLFEFYKLLCVRGIITSKTKSLDEGYNKALNDLCIKVNNWDLFFSPSEDNFTNDLNKGEEITSDTNIEAAEENISLDLIQQYYLTFNFDNEPENISIENLSSDIIGQLELMPNIERFPNGKKYELDKYTMFHYLRAQEFEHGKSRIVLTNSVNEALLNPSSVYTFFSSDYVRKVNKATEAAMFLGWVEQLVYDFTDETSEVSTTDKIADITIIIPYIGPALNIGNMLYKDDFVGALIFSGAVILLEFIPEIAIPVLGTFALVSYIANKVLTVQTIDNALSKRNEKWGEVYKYIVTNWLAKVNTQIDLIRKKMKEALENQAEATKAIINYQYNQYTEEEKNNINFNIGDLSSKLNDSINKAMININKFLNQCSVSYLMNSMIPYGVKRLEDFDASLKDALLKYIYDNRGTLIGQVDRLKDKVNNTLSTDIPFQLSKYVDNQRLLSTFTEYIKNIINTSILNLRYESNHLIDLSRYASEINIGSKVNFDPIDKNQIQLFNLESSKIEIILKNAIVYNSMYENFSTSFWIKIPKYFSKINLNNEYTIINCIENNSGWKVSLNYGEIIWTLQDNKQNIQRVVFKYSQMVAISDYINRWIFITITNNRLNNSKIYINGRLIDQKPISNLGNIHASNNIMFKLDGCRDPQRYIWIKYFNLFDKELNEKEIKDLYDNQSNSGILKDFWGNYLQYDKPYYMLNLYDPNKYVDVNNVGIRGYMYLKGPRGSIVTTNIYLNSSLYMGTKFIIKKYASGNKDNIVRNNDRVYINVVVKNKEYRLATNASQAGVEKILSVLEIPDVGNLSQVVVMKSKNDQGIRNKCKMNLQDNNGNDIGFIGFHQFNNIDKLVASNWYNRQIERSSRTFGCSWEFIPVDDGWGESPL

SEQ ID NO: 6 - protein, 1291 aa, Clostridium botulinum B1
MSVTINNFNYNDPIDNDNIIMMEPPFARGTGRYYKAFKITDRIWIIPERYTFGYKPEDFNKSSGIFNRDVCEYYDPDYLNTNDKKNIFLQTMIKLFNRIKSKPLGEKLLEMIINGIPYLGDRRVPLEEFNTNIASVTVNKLISNPGEVERKKGIFANLIIFGPGPVLNENETIDIGIQNHFASREGFGGIMQMKFCPEYVSVFNNVQENKGASIFNRRGYFSDPALILMHELIHVLHGLYGIKVDDLPIVPNEKKFFMQSTDAIQAEELYTFGGQDPSIITPSTDKSIYDKVLQNFRGIVDRLNKVLVCISDPNININIYKNKFKDKYKFVEDSEGKYSIDVESFDKLYKSLMFGFTETNIAENYKIKTRASYFSDSLPPVKIKNLLDNEIYTIEEGFNISDKDMEKEYRGQNKAINKQAYEEISKEHLAVYKIQMCKSVKAPGICIDVDNEDLFFIADKNSFSDDLSKNERIEYNTQSNYIENDFPINELILDTDLISKIELPSENTESLTDFNVDVPAYEKQPAIKKIFTDENTIFQYLYSQTFPLDIRDISLTSSFDDALLFSNKVYSFFSMDYIKTANKVVEAGLFAGWVKQIVNDFVIEANKSNTMDKIADISLIVPYIGLALNVGNETAKGNFENAFEIAGASILLEFIPELLIPVVGAFLLESYIDNKNKIIKTIDNALTKRNEKWSDMYGLIVAQWLSTVNTQFYTIKEGMYKALNYQAQALEEIIKYRYNIYSEKEKSNINIDFNDINSKLNEGINQAIDNINNFINGCSVSYLMKKMIPLAVEKLLDFDNTLKKNLLNYIDENKLYLIGSAEYEKSKVNKYLKTIMPFDLSIYTNDTILIEMFNKYNSEILNNIILNLRYKDNNLIDLSGYGAKVEVYDGVELNDKNQFKLTSSANSKIRVTQNQNIIFNSVFLDFSVSFWIRIPKYKNDGIQNYIHNEYTIINCMKNNSGWKISIRGNRIIWTLIDINGKTKSVFFEYNIREDISEYINRWFFVTITNNLNNAKIYINGKLESNTDIKDIREVIANGEIIFKLDGDIDRTQFIWMKYFSIFNTELSQSNIEERYKIQSYSEYLKDFWGNPLMYNKEYYMFNAGNKNSYIKLKKDSPVGEILTRSKYNQNSKYINYRDLYIGEKFIIRRKSNSQSINDDIVRKEDYIYLDFFNLNQEWRVYIYKYFKKEEEKLFLAPISDSDEFYNTIQIKEYDEQPTYSCQLLFKKDEESTDEIGLIGIHRFYESGIVFKEYKDYFCISKWYLKEVKRKPYNSKLGCNWQFIPKDEGWTE

SEQ ID NO: 7 - protein, 1291 aa, Clostridium botulinum B2
MPVTINNFNYNDPIDNNNIIMMEPPFARGTGRYYKAFKITDRIWIIPERYTFGYKPEDFNKSSGIFNRDVCEYYDPDYLNTNDKKNIFLQTMIKLFNRIKSKPLGEKLLEMIINGIPYLGDRRVPLEEFNTNIASVTVNKLISNPGEVERKKGIFANLIIFGPGPVLNENETIDIGIQNHFASREGFGGIMQMKFCPEYVSVFNNVQENKGASIFNRRGYFSDPALILMHELIHVLHGLYGIKVDDLPIVPNEKKFFMQSTDAIQAEELYTFGGQDPSIITPSTDKSIYDKVLQNFRGIVDRLNKVLVCISDPNININIYKNKFKDKYKFVEDSEGKYSIDVESFDKLYKSLMFGFTETNIAENYKIKTRASYFSDSLPPVKIKNLLDNEIYTIEEGFNISDKNMEKEYRGQNKAINKQAYEEISKEHLAVYKIQMCKSVRAPGICIDVDNEDLFFIADKNSFSDDLSKNERIEYDTQSNYIENRSSIDELILDTNLISKIELPSENTESLTDFNVDVPVYEKQPAIKKIFTDENTIFQYLYSQTFPLDIRDISLTSSFDDALLFSKKVYSFFSMDYIKTANKVVEAGLFAGWVKQIVDDFVIEANKSSTMDKIADISLIVPYIGLALNVGNETAKGNFENAFEIAGASILLEFIPELLIPVVGAFLLESYIDNKNKIIKTIDNALTKRDEKWIDMYGLIVAQWLSTVNTQFYTIKEGMYKALNYQAQALEEIIKYKYNIYSEKEKSNINIDFNDINSKLNEGINQAIDNINNFINECSVSYLMKKMIPLAVEKLLDFDNTLKKNLLNYIDENKLYLIGSAEYEKSKVDKHLKTIIPFDLSKYTNNTILIEIFNKYNSEILNNIILNLRYRDNNLIDLSGYGANVEVYDGVELNDKNQFKLTSSTNSEIRVTQNQNIIFNSMFLDFSVSFWIRIPKYKNDGIQNYIHNEYTIINCIKNNSGWKISIRGNRIIWTLTDINGKTKSVFFEYSIRKDVSEYINRWFFVTITNNSDNAKIYINGKLESNIDIKDIGEVIANGEIIFKLDGDIDRTQFIWMKYFSIFNTELSQSNIKEIYKIQSYSEYLKDFWGNPLMYNKEYYMFNAGNKNSYIKLKKDSSVGEILTRSKYNQNSNYINYRNLYIGEKFIIRRKSNSQSINDDIVRKEDYIYLDFFNSNREWRVYAYKDFKEEEKKLFLANIYDSNEFYKTIQIKEYDEQPTYSCQLLFKKDEESTDEIGLIGIHRFYESGTVFKNYKDYFCISKWYLKEVKRKPYNSDLGCNWKFIPKDEGWTE

SEQ ID NO: 8 - protein, 1291 aa, Clostridium botulinum B3
MPVTINNFNYNDPIDNDNIIMMEPPFARGTGRYYKAFKITDRIWIIPERYTFGYKPEDFNKSSGIFNRDVCEYYDPDYLNTNDKKNIFLQTMIKLFNRIKSKPLGEKLLEMIINGIPYLGDRRVPLEEFNTNIASVTVNKLISNPGEVERKKGIFANLIIFGPGPVLNENETIDIGIQNHFASREGFGGIMQMKFCPEYVSVFNNVQENKGASIFNRRGYFSDPALILMHELIHVLHGLYGIKVDDLPIVPNEKKFFMQSTDAIQAEELYTFGGQDPRIITPSTDKSIYDKVLQNFRGIVDRLNKVLVCISDPNININIYKNKFKDKYKFVEDSEGKYSIDVESFDKLYKSLMFGFTETNIAENYKIKTRASYFSDSLPPVKIKNLLDNEIYTIEEGFNISDKNMEKEYRGQNKAINKQAYEEISKEHLAVYKIQMCKSVRAPGICIDVDNEDLFFIADKNSFSDDLSKNERIEYDTQSNYIENRSSIDELILDTNLISKIELPSENTESLTDFNVDVPVYEKQPAIKKIFTDENTIFQYLYSQTFPLDIRDISLTSSFDDALLFSNKVYSFFSMDYIKTANKVVEAGLFAGWVKQIVDDFVIEANKSSTMDKIADISLIVPYIGLALNVGNETAKGNFENAFEIAGASILLEFIPELLIPVVGAFLLESYIDNKNKIIKTIDNALTKRDEKWIDMYGLIVAQWLSTVNTQFYTIKEGMYKALNYQAQALEEIIKYKYNIYSEKEKSNINIDFNDINSKLNEGINQAIDNINNFINECSVSYLMKKMIPLAVEKLLDFDNTLKKNLLNYIDENKLYLIGSAEYEKSKVDKHLKTIIPFDLSMYTNNTILIEIFNKYNSEILNNIILNLRYRDNNLIDLSGYGAKVEVYNGVELNDKNQFKLTSSANSKIRVTQNQDIIFNSMFLDFSVSFWIRIPKYKNDGIQNYIHNEYTIINCIKNNSGWKISIRGNKIIWTLTDINGKTKSVFFEYSIRKDVSEYINRWFFVTITNNSDNAKIYINGKLESNIDIKDIGEVIANGEIIFKLDGDIDRTQFIWMKYFSIFNTELSQSNIKEIYKIQSYSEYLKDFWGNPLMYNKEYYMFNAGNKNSYIKLKKDSSVGEILTRSKYNQNSNYINYRNLYIGEKFIIRRKSNSQSINDDIVRKEDYIYLDFFNLNQEWRVYAYKDFKKKEEKLFLANIYDSNEFYNTIQIKEYDEQPTYSCQLLFKKDEESTDEIGLIGIHRFYESGIVFKDYKDYFCISKWYLKEVKRKPYNPNLGCNWQFIPKDEGWIE

SEQ ID NO: 9 - protein, 1291 aa, Clostridium botulinum Bnp
MPVTINNFNYNDPIDNDNIIMMEPPFARGTGRYYKAFKITDRIWIIPERYTFGYKPEDFNKSSGIFNRDVCEYYDPDYLNTNDKKNIFLQTMIKLFNRIKSKPLGEKLLEMIINGIPYLGDRRVPLEEFNTNIASVTVNKLISNPGEVEQKKGIFANLIIFGPGPVLNENETIDIGIQNHFASREGFGGIMQMKFCPEYVSVFNNVQENKGASIFNRRGYFSDPALILMHELIHVLHGLYGIKVDDLPIVPNEKKFFMQSTDTIQAEELYTFGGQDPSIISPSTDKSIYDKVLQNFRGIVDRLNKVLVCISDPNININIYKNKFKDKYKFVEDSEGKYSIDVESFNKLYKSLMFGFTEINIAENYKIKTRASYFSDSLPPVKIKNLLDNEIYTIEEGFNISDKNMGKEYRGQNKAINKQAYEEISKEHLAVYKIQMCKSVKVPGICIDVDNENLFFIADKNSFSDDLSKNERVEYNTQNNYIGNDFPINELILDTDLISKIELPSENTESLTDFNVDVPVYEKQPAIKKVFTDENTIFQYLYSQTFPLNIRDISLTSSFDDALLVSSKVYSFFSMDYIKTANKVVEAGLFAGWVKQIVDDFVIEANKSSTMDKIADISLIVPYIGLALNVGDETAKGNFESAFEIAGSSILLEFIPELLIPVVGVFLLESYIDNKNKIIKTIDNALTKRVEKWIDMYGLIVAQWLSTVNTQFYTIKEGMYKALNYQAQALEEIIKYKYNIYSEEEKSNININFNDINSKLNDGINQAMDNINDFINECSVSYLMKKMIPLAVKKLLDFDNTLKKNLLNYIDENKLYLIGSVEDEKSKVDKYLKTIIPFDLSTYTNNEILIKIFNKYNSEILNNIILNLRYRDNNLIDLSGYGAKVEVYDGVKLNDKNQFKLTSSADSKIRVTQNQNIIFNSMFLDFSVSFWIRIPKYRNDDIQNYIHNEYTIINCMKNNSGWKISIRGNRIIWTLIDINGKTKSVFFEYNIREDISEYINRWFFVTITNNLDNAKIYINGTLESNMDIKDIGEVIVNGEITFKLDGDVDRTQFIWMKYFSIFNTQLNQSNIKEIYKIQSYSEYLKDFWGNPLMYNKEYYMFNAGNKNSYIKLVKDSSVGEILIRSKYNQNSNYINYRNLYIGEKFIIRRKSNSQSINDDIVRKEDYIHLDFVNSNEEWRVYAYKNFKEQEQKLFLSIIYDSNEFYKTIQIKEYDEQPTYSCQLLFKKDEESTDDIGLIGIHRFYESGVLRKKYKDYFCISKWYLKEVKRKPYKSNLGCNWQFIPKDEGWTE

SEQ ID NO: 10 - protein, 1291 aa, Clostridium botulinum Bbv
MPVTINNFNYNDPIDNNNIIMMEPPFARGMGRYYKAFKITDRIWIIPERYTFGYKPEDFNKSSGIFNRDVCEYYDPDYLNTNDKKNIFLQTMIKLFNRIKSKPLGEKLLEMIINGIPYLGDRRVPLEEFNTNIASVTVNKLISNPGEVERKKGIFANLIIFGPGPVLNENETIDIGIQNHFASREGFGGIMQMKFCPEYVSVFNNVQENKGASIFNRRGYFSDPALILMHELIHVLHGLYGIKVNDLPIVPNEKKFFMQSTDAIQAEELYTFGGQDPSIISPSTDKSIYDKVLQNFRGIVDRLNKVLVCISDPNININIYKNKFKDKYKFVEDSEGKYSIDVESFDKLYKSLMFGFTETNIAENYKIKTRASYFSDSLPPVKIKNLLDNEIYTIEEGFNISDKNMEKEYRGQNKAINKQAYEEISKEHLAVYKIQMCKSVKAPGICIDVDNEDLFFIADKNSFSDDLSKNERIAYNTQNNYIENDFSINELILDTDLISKIELPSENTESLTDFNVYVPVYKKQPAIKKIFTDENTIFQYLYSQTFPLDIRDISLTSSFDDALLFSNKVYSFFSMDYIKTANKVVEAGLFAGWVKQIVDDFVIEANKSSTMDKIADISLIVPYIGLALNVGNETAKGNFENAFEIAGASILLEFIPELLIPVVGAFLLESYIDNKNKIIETINSALTKRDEKWIDMYGLIVAQWLSTVNTQFYTIKEGMYKALNYQAQALEEIIKYKYNIYSEKERSNINIDFNDVNSKLNEGINQAIDNINNFINECSVSYLMKKMIPLAVEKLLDFDNTLRKNLLNYIDENKLYLIGSAEYEKSKVDKYLKTSIPFDLSTYTNNTILIEIFNKYNSDILNNIILNLRYRDNKLIDLSGYGAKVEVYDGVKLNDKNQFKLTSSANSKIRVIQNQNIIFNSMFLDFSVSFWIRIPKYKNDGIQNYIHNEYTIINCMKNNSGWKISIRGNMIIWTLIDINGKIKSVFFEYSIKEDISEYINRWFFVTITNNSDNAKIYINGKLESHIDIRDIREVIANDEIIFKLDGNIDRTQFIWMKYFSIFNTELSQSNIEEIYKIQSYSEYLKDFWGNPLMYNKEYYMFNAGNKNSYIKLKKDSSVGEILTRSKYNQNSKYINYRDLYIGEKFIIRRKSNSQSINDDIVRKEDYIYLDFFNLNQEWRVYMYKYFKKEEEKLFLAPISDSDEFYNTIQIKEYDEQPTYSCQLLFKKDEESTDEIGLIGIHRFYESGIVFKEYKDYFCISKWYLKEVKRKPYNSKLGCNWQFIPKDEGWTE

SEQ ID NO: 11 - protein, 1291 aa, Clostridium botulinum C1-1
MPITINNFNYSDPVDNKNILYLDTHLNTLANEPEKAFRITGNIWVIPDRFSRNSNPNLNKPPRVTSPKSGYYDPNYLSTDSDKDTFLKEIIKLFKRINSREIGEELIYRLSTDIPFPGNNNTPINTFDFDVDFNSVDVKTRQGNNWVKTGSINPSVIITGPRENIIDPETSTFKLTNNTFAAQEGFGALSIISISPRFMLTYSNATNDVGEGRFSKSEFCMDPILILMHELNHAMHNLYGIAIPNDQTISSVTSNIFYSQYNVKLEYAEIYAFGGPTIDLIPKSARKYFEEKALDYYRSIAKRLNSITTANPSSFNKYIGEYKQKLIRKYRFVVESSGEVTVNRNKFVELYNELTQIFTEFNYAKIYNVQNRKIYLSNVYTPVTANILDDNVYDIQNGFNIPKSNLNVLFMGQNLSRNPALRKVNPENMLYLFTKFCHKAIDGRSLYNKTLDCRELLVKNTDLPFIGDISDVKTDIFLRKDINEETEVIYYPDNVSVDQVILSKNTSEHGQLDLLYPSIDSESEILPGENQVFYDNRTQNVDYLNSYYYLESQKLSDNVEDFTFTRSIEEALDNSAKVYTYFPTLANKVNAGVQGGLFLMWANDVVEDFTTNILRKDTLDKISDVSAIIPYIGPALNISNSVRRGNFTEAFAVTGVTILLEAFPEFTIPALGAFVIYSKVQERNEIIKTIDNCLEQRIKRWKDSYEWMMGTWLSRIITQFNNISYQMYDSLNYQAGAIKAKIDLEYKKYSGSDKENIKSQVENLKNSLDVKISEAMNNINKFIRECSVTYLFKNMLPKVIDELNEFDRNTKAKLINLIDSHNIILVGEVDKLKAKVNNSFQNTIPFNIFSYTNNSLLKDIINEYFNNINDSKILSLQNRKNTLVDTSGYNAEVSEEGDVQLNPIFPFDFKLGSSGEDRGKVIVTQNENIVYNSMYESFSISFWIRINKWVSNLPGYTIIDSVKNNSGWSIGIISNFLVFTLKQNEDSEQSINFSYDISNNAPGYNKWFFVTVTNNMMGNMKIYINGKLIDTIKVKELTGINFSKTITFEINKIPDTGLITSDSDNINMWIRDFYIFAKELDGKDINILFNSLQYTNVVKDYWGNDLRYNKEYYMVNIDYLNRYMYANSRQIVFNTRRNNNDFNEGYKIIIKRIRGNTNDTRVRGGDILYFDMTINNKAYNLFMKNETMYADNHSTEDIYAIGLREQTKDINDNIIFQIQPMNNTYYYASQIFKSNFNGENISGICSIGTYRFRLGGDWYRHNYLVPTVKQGNYASLLESTSTHWGFVPVSE

SEQ ID NO: 12 - protein, 1280 aa, Clostridium botulinum C1-2
MPITINNFNYSDPVDNKNILYLDTHLNTLANEPEKAFRIIGNIWVIPDRFSRDSNPNLNKPPRVTSPKSGYYDPNYLSTDSEKDTFLKEIIKLFKRINSREIGEELIYRLATDIPFPGNNNTPINTFDFDVDFNSVDVKTRQGNNWVKTGSINPSVIITGPRENIIDPETSTFKLTNNTFAAQEGFGALSIISISPRFMLTYSNATNNVGEGRFSKSEFCMDPILILMHELNHTMHNLYGIAIPNDQRISSVTSNIFYSQYKVKLEYAEIYAFGGPTIDLIPKSGRKYFEEKALDYYRSIAKRLNSITTANPSSFNKYIGEYKQKLIRKYRFVVESSGEVAVDRNKFAELYKELTQIFTEFNYAKIYNVQNRKIYLSNVYTPVTANILDDNVYDIQNGFNIPKSNLNVLFMGQNLSRNPALRKVNPENMLYLFTKFCHKAIDGRSLYNKTLDCRELLVKNTDLPFIGDISDIKTDIFLSKDINVETEVIDYPDNVSVDQVILSKNTSEHGQLDLLYPIIEGESQVLPGENQVFYDNRTQNVDYLNSYYYLESQKLSDNVEDFTFTTSIEEALDNSGKVYTYFPKLADKVNTGVQGGLFLMWANDVVEDFTTNILRKDTLDKISDVSAIIPYIGPALNISNSVRRENFTEAFAVTGVTILLEAFQEFTIPALGAFVIYSKVQERNEIIKTIDNCLEQRIKRWKDSYEWMIGTWLSRITTQFNNISYQMYDSLNYQADAIKDKIDLEYKKYSGSDKENIKSQVENLKNSLDIKISEAMNNINKFIRECSVTYLFKNMLPKVIDELNKFDLKTKTELINLIDSHNIILVGEVDRLKAKVNESFENTIPFNIFSYTNNSLLKDIINEYFNSINDSKILSLQNKKNALVDTSGYNAEVRLEGDVQVNTIYTNDFKLSSSGDKIIVNLNNNILYSAIYENSSVSFWIKISKDLTNSHNEYTIINSIKQNSGWKLCIRNGNIEWILQDINRKYKSLIFDYSESLSHTGYTNKWFFVTITNNIMGYMKLYINGELKQSERIEDLNEVKLDKTIVFGIDENIDENQMLWIRDFNIFSKELSNEDINIVYEGQILRNVIKDYWGNPLKFDTEYYIINDNYIDRYIAPKSNILVLVQYPDRSKLYTGNPITIKSVSDKNPYSRILNGDNIMFHMLYNSGKYMIIRDTDTIYAIEGRECSKNCVYALKLQSNLGNYGIGIFSIKNIVSQNKYCSQIFSSFMKNTMLLADIYKPWRFSFENAYTPVAVTNYETKLLSTSSFWKFISRDPGWVE

SEQ ID NO: 13 - protein, 1276 aa, Clostridium botulinum D1
MTWPVKDFNYSDPVNDNDILYLRIPQNKLITTPVKAFMITQNIWVIPERFSSDTNPSLSKPPRPTSKYQSYYDPSYLSTDEQKDTFLKGIIKLFKRINERDIGKKLINYLVVGSPFMGDSSTPEDTFDFTRHTTNIAVEKFENGSWKVTNIITPSVLIFGPLPNILDYTASLTLQGQQSNPSFEGFGTLSILKVAPEFLLTFSDVTSNQSSAVLGKSIFCMDPVIALMHELTHSLHQLYGINIPSDKRIRPQVSEGFFSQDGPNVQFEELYTFGGLDVEIIPQIERSQLREKALGHYKDIAKRLNNINKTIPSSWISNIDKYKKIFSEKYNFDKDNTGNFVVNIDKFNSLYSDLTNVMSEVVYSSQYNVKNRTHYFSRHYLPVFANILDDNIYTIRDGFNLTNKGFNIENSGQNIERNPALQKLSSESVVDLFTKVCLRLTKNSRDDSTCIKVKNNRLPYVADKDSISQEIFENKIITDETNVQNYSDKFSLDESILDGQVPINPEIVDPLLPNVNMEPLNLPGEEIVFYDDITKYVDYLNSYYYLESQKLSNNVENITLTTSVEEALGYSNKIYTFLPSLAEKVNKGVQAGLFLNWANEVVEDFTTNIMKKDTLDKISDVSVIIPYIGPALNIGNSALRGNFNQAFATAGVAFLLEGFPEFTIPALGVFTFYSSIQEREKIIKTIENCLEQRVKRWKDSYQWMVSNWLSRITTQFNHINYQMYDSLSYQADAIKAKIDLEYKKYSGSDKENIKSQVENLKNSLDVKISEAMNNINKFIRECSVTYLFKNMLPKVIDELNKFDLRTKTELINLIDSHNIILVGEVDRLKAKVNESFENTMPFNIFSYTNNSLLKDIINEYFNSINDSKILSLQNKKNALVDTSGYNAEVRVGDNVQLNTIYTNDFKLSSSGDKIIVNLNNNILYSAIYENSSVSFWIKISKDLTNSHNEYTIINSIEQNSGWKLCIRNGNIEWILQDVNRKYKSLIFDYSESLSHTGYTNKWFFVTITNNIMGYMKLYINGELKQSQKIEDLDEVKLDKTIVFGIDENIDENQMLWIRDFNIFSKELSNEDINIVYEGQILRNVIKDYWGNPLKFDTEYYIINDNYIDRYIAPESNVLVLVQYPDRSKLYTGNPITIKSVSDKNPYSRILNGDNIILHMLYNSRKYMIIRDTDTIYATQGGECSQNCVYALKLQSNLGNYGIGIFSIKNIVSKNKYCSQIFSSFRENTMLLADIYKPWRFSFKNAYTPVAVTNYETKLLSTSSFWKFISRDPGWVE

SEQ ID NO: 14 - protein, 1285 aa, Clostridium botulinum D2
MTWPVKDFNYSDPVNDNDILYLRIPQNKLITTPVKAFMITQNIWVIPERFSSDTNPSLSKPPRPTSKYQSYYDPSYLSTDEQKDTFLKGIIKLFKRINERDIGKKLINYLVVGSPFMGDSSTPEDTFDFTRHTTNIAVEKFENGSWKVTNIITPSVLIFGPLPNILDYTASLTLQGQQSNPSFEGFGTLSILKVAPEFLLTFSDVTSNQSSAVLGKSIFCMDPVIALMHELTHSLHQLYGINIPSDKRIRPQVSEGFFSQDGPNVQFEELYTFGGSDVEIIPQIERLQLREKALGHYKDIAKRLNNINKTIPSSWSSNIDKYKKIFSEKYNFDKDNTGNFVVNIDKFNSLYSDLTNVMSEVVYSSQYNVKNRTHYFSKHYLPVFANILDDNIYTIINGFNLTTKGFNIENSGQNIERNPALQKLSSESVVDLFTKVCLRLTRNSRDDSTCIQVKNNTLPYVADKDSISQEIFESQIITDETNVENYSDNFSLDESILDAKVPTNPEAVDPLLPNVNMEPLNVPGEEEVFYDDITKDVDYLNSYYYLEAQKLSNNVENITLTTSVEEALGYSNKIYTFLPSLAEKVNKGVQAGLFLNWANEVVEDFTTNIMKKDTLDKISDVSAIIPYIGPALNIGNSALRGNFKQAFATAGVAFLLEGFPEFTIPALGVFTFYSSIQEREKIIKTIENCLEQRVKRWKDSYQWMVSNWLSRITTRFNHISYQMYDSLSYQADAIKAKIDLEYKKYSGSDKENIKSQVENLKNSLDVKISEAMNNINKFIRECSVTYLFKNMLPKVIDELNKFDLKTKTELINLIDSHNIILVGEVDRLKAKVNESFENTIPFNIFSYTNNSLLKDMINEYFNSINDSKILSLQNKKNTLMDTSGYNAEVRVEGNVQLNPIFPFDFKLGSSGDDRGKVIVTQNENIVYNAMYESFSISFWIRINKWVSNLPGYTIIDSVKNNSGWSIGIISNFLVFTLKQNENSEQDINFSYDISKNAAGYNKWFFVTITTNMMGNMMIYINGKLIDTIKVKELTGINFSKTITFQMNKIPNTGLITSDSDNINMWIRDFYIFAKELDDKDINILFNSLQYTNVVKDYWGNDLRYDKEYYMINVNYMNRYMSKKGNGIVFNTRKNNNDFNEGYKIIIKRIRGNTNDTRVRGENVLYFNTTIDNKQYSLGMYKPSRNLGTDLVPLGALDQPMDEIRKYGSFIIQPCNTFDYYASQLFLSSNATTNRLGILSIGSYSFKLGDDYWFNHEYLIPVIKIEHYASLLESTSTHWVFVPASE

SEQ ID NO: 15 - protein, 1252 aa, Clostridium botulinum E1
MPKINSFNYNDPVNDRTILYIKPGGCQEFYKSFNIMKNIWIIPERNVIGTTPQDFHPPTSLKNGDSSYYDPNYLQSDEEKDRFLKIVTKIFNRINNNLSGGILLEELSKANPYLGNDNTPDNQFHIGDASAVEIKFSNGSQDILLPNVIIMGAEPDLFETNSSNISLRNNYMPSNHGFGSIAIVTFSPEYSFRFNDNSMNEFIQDPALTLMHELIHSLHGLYGAKGITTKYTITQKQNPLITNIRGTNIEEFLTFGGTDLNIITSAQSNDIYTNLLADYKKIASKLSKVQVSNPLLNPYKDVFEAKYGLDKDASGIYSVNINKFNDIFKKLYSFTEFDLATKFQVKCRQTYIGQYKYFKLSNLLNDSIYNISEGYNINNLKVNFRGQNANLNPRIITPITGRGLVKKIIRFCKNIVSVKGIRKSICIEINNGELFFVASENSYNDDNINTPKEIDDTVTSNNNYENDLDQVILNFNSESAPGLSDEKLNLTIQNDAYIPKYDSNGTSDIEQHDVNELNVFFYLDAQKVPEGENNVNLTSSIDTALLEQPKIYTFFSSEFINNVNKPVQAALFVSWIQQVLVDFTTEANQKSTVDKIADISIVVPYIGLALNIGNEAQKGNFKDALELLGAGILLEFEPELLIPTILVFTIKSFLGSSDNKNKVIKAINNALKERDEKWKEVYSFIVSNWMTKINTQFNKRKEQMYQALQNQVNAIKTIIESKYNSYTLEEKNELTNKYDIKQIENELNQKVSIAMNNIDRFLTESSISYLMKLINEVKINKLREYDENVKTYLLNYIIQHGSILGESQQELNSMVTDTLNNSIPFKLSSYTDDKILISYFNKFFKRIKSSSVLNMRYKNDKYVDTSGYDSNININGDVYKYPTNKNQFGIYNDKLSEVNISQNDYIIYDNKYKNFSISFWVRIPNYDNKIVNVNNEYTIINCMRDNNSGWKVSLNHNEIIWTLQDNAGINQKLAFNYGNANGISDYINKWIFVTITNDRLGDSKLYINGNLIDQKSILNLGNIHVSDNILFKIVNCSYTRYIGIRYFNIFDKELDETEIQTLYSNEPNTNILKDFWGNYLLYDKEYYLLNVLKPNNFIDRRKDSTLSINNIRSTILLANRLYSGIKVKIQRVNNSSTNDNLVRKNDQVYINFVASKTHLFPLYADTATTNKEKTIKISSSGNRFNQVVVMNSVGNNCTMNFKNNNGNNIGLLGFKADTVVASTWYYTHMRDHTNSNGCFWNFISEEHGWQEK

SEQ ID NO: 16 - protein, 1252 aa, Clostridium botulinum E2
MPKINSFNYNDPVNDRTILYIKPGGCQEFYKSFNIMKNIWIIPERNVIGTTPQDFHPPTSLKNGDSSYYDPNYLQSDEEKDRFLKIVTKIFNRINNNLSGGILLEELSKANPYLGNDNTPDNQFHIGDASAVEIKFSNGIQDILLPNVIIMGAEPDLFETNSSNISLRNNYMPSNHGFGSIAIVTFSPEYSFRFNDNSMNEFIQDPALTLMHELIHSLHGLYGAKGITTKYTITQKQNPLITNIRGTNIEEFLTFGGTDLNIITSAQSNDIYTNLLADYKKIASKLSKVQVSNPLLNPYKDVFEAKYGLDKDASGIYSVNINKFNDIFKKLYSFTEFDLATKFQVKCRQTYIGQYKYFKLSNLLNDSIYNISEGYNINNLKVNFRGQNANLNPRIITPITGRGLVKKIIRFCKNIVSVKGIRKSICIEINNGELFFVASENSYNDDNINTPKEIDDTVTSNNNYENDLDQVILNFNSESAPGLSDEKLNLTIQNDAYIPKYDSNGTSDIEQHDVNELNVFFYLDAQKVPEGENNVNLTSSIDTALLEQPKIYTFFSSEFINNVNKPVQAALFVSWIQQVLVDFTTEANQKSTVDKIADISIVVPYIGLALNIGNEAQKGNFKDALELLGAGILLEFEPELLIPTILVFTIKSFLGSSDNKNKVIKAINNALKERDEKWKEVYSFIVSNWMTKINTQFNKRKEQMYQALQNQVNAIKTIIESKYNSYTLEEKNELTNKYDIKQIENELNQKVSIAMNNIDRFLTESSISYLMKLINEVKINKLREYDENVKTYLLNYIIQHGSILGESQQELNSMVTDTLNNSIPFKLSSYTDDKILISYFNKFFKRIKSSSVLNMRYKNDKYVDTSGYDSNININGDVYKYPTNKNQFGIYNDKLSEVNISQNDYIIYDNKYKNFSISFWVRIPNYDNKIVNVNNEYTIINCMRDNNSGWKVSLNHNEIIWTLQDNAGINQKLAFNYGNANGISDYINKWIFVTITNDRLGDSKLYINGNLIDQKSILNLGNIHVSDNILFKIVNCSYTRYIGIRYFNIFDKELDETEIQTLYNNEPNANILKDFWGNYLLYDKEYYLLNVLKPNNFIDRRTDSTLSINNIRSTILLANRLYSGIKVKIQRVNNSSTNDNLVRKNDQVYINFVASKTHLFPLYADTNTTNKEKTIKSSSSGNRFNQVVVMNSVGNNCTMNFKNNNGNNIGMLGFKDNTLVASTWYYTHMRDNTNSNGCFWNFISEEHGWQEK

SEQ ID NO: 17 - protein, 1252 aa, Clostridium botulinum E3
MPKINSFNYNDPVNDRTILYIKPGGCQEFYKSFNIMKNIWIIPERNVIGTTPQDFHPPTSLKNGDSSYYDPNYLQSDEEKDRFLKIVTKIFNRINNNLSGGILLEELSKANPYLGNDNTPDNQFHIGDASAVEIKFSNGSQHILLPNVIIMGAEPDLFETNSSNISLRNNYMPSNHGFGSIAIVTFSPEYSFRFNDNSINEFIQDPALTLMHELIHSLHGLYGAKGITTTCIITQQQNPLITNRKGINIEEFLTFGGNDLNIITVAQYNDIYTNLLNDYRKIASKLSKVQVSNPQLNPYKDIFQEKYGLDKDASGIYSVNINKFDDILKKLYSFTEFDLATKFQVKCRETYIGQYKYFKLSNLLNDSIYNISEGYNINNLKVNFRGQNANLNPRIIKPITGRGLVKKIIRFCKNIVSVKGIRKSICIEINNGELFFVASENSYNDDNINTPKEIDDTVTSNNNYENDLDQVILNFNSESAPGLSDEKLNLTIQNDAYIPKYDSNGTSDIEQHDVNELNVFFYLDAQKVPEGENNVNLTSSIDTALLEQPKIYTFFSSEFINNVNKPVQAALFVSWIQQVLVDFTTEANQKSTVDKIADISIVVPYIGLALNIGNEAQKGNFKDALELLGAGILLEFEPELLIPTILVFTIKSFLGSSDNKNKVIKAINNALKERDEKWKEVYSFIVSNWMTKINTQFNKRKEQMYQALQNQVNAIKTIIESKYNSYTLEEKNELTNKYDIKQIENELNQKVSIAMNNIDRFLTESSISYLMKLINEVKINKLREYDENVKTYLLNYIIQHGSILGESQQELNSMVTDTLNNSIPFKLSSYTDDKILISYFNKFFKRIKSSSVLNMRYKNDKYVDTSGYDSNININGDVYKYPTNKNQFGIYNDKLSEVNISQNDYIIYDNKYKNFSISFWVRIPNYDNKIVNVNNEYTIINCMRDNNSGWKVSLNHNEIIWTLQDNAGINQKLAFNYGNANGISDYINKWIFVTITNDRLGDSKLYINGNLIDQKSILNLGNIHVSDNILFKIVNCSYTRYIGIRYFNIFDKELDETEIQTLYSNEPNTNILKDFWGNYLLYDKEYYLLNVLKPNNFIDRRKDSTLSINNIRSTILLANRLYSGIKVKIQRVNNSSTNDNLVRKNDQVYINFVASKTHLFPLYADTATTNKEKTIKISSSGNRFNQVVVMNSVGNNCTMNFKNNNGNNIGLLGFKADTVVASTWYYTHMRDHTNSNGCFWNFISEEHGWQEK

SEQ ID NO: 18 - protein, 1274 aa, Clostridium botulinum F1
MPVAINSFNYNDPVNDDTILYMQIPYEEKSKKYYKAFEIMRNVWIIPERNTIGTNPSDFDPPASLKNGSSAYYDPNYLTTDAEKDRYLKTTIKLFKRINSNPAGKVLLQEISYAKPYLGNDHTPIDEFSPVTRTTSVNIKLSTNVESSMLLNLLVLGAGPDIFESCCYPVRKLIDPDVVYDPSNYGFGSINIVTFSPEYEYTFNDISGGHNSSTESFIADPAISLAHELIHALHGLYGARGVTYEETIEVKQAPLMIAEKPIRLEEFLTFGGQDLNIITSAMKEKIYNNLLANYEKIATRLSEVNSAPPEYDINEYKDYFQWKYGLDKNADGSYTVNENKFNEIYKKLYSFTESDLANKFKVKCRNTYFIKYEFLKVPNLLDDDIYTVSEGFNIGNLAVNNRGQSIKLNPKIIDSIPDKGLVEKIVKFCKSVIPRKGTKAPPRLCIRVNNSELFFVASESSYNENDINTPKEIDDTTNLNNNYRNNLDEVILDYNSQTIPQISNRTLNTLVQDNSYVPRYDSNGTSEIEEYDVVDFNVFFYLHAQKVPEGETNISLTSSIDTALLEESKDIFFSSEFIDTINKPVNAALFIDWISKVIRDFTTEATQKSTVDKIADISLIVPYVGLALNIIIEAEKGNFEEAFELLGVGILLEFVPELTIPVILVFTIKSYIDSYENKNKAIKAINNSLIEREAKWKEIYSWIVSNWLTRINTQFNKRKEQMYQALQNQVDAIKTAIEYKYNNYTSDEKNRLESEYNINNIEEELNKKVSLAMKNIERFMTESSISYLMKLINEAKVGKLKKYDNHVKSDLLNYILDHRSILGEQTNELSDLVTSTLNSSIPFELSSYTNDKILIIYFNRLYKKIKDSSILDMRYENNKFIDISGYGSNISINGNVYIYSTNRNQFGIYNSRLSEVNIAQNNDIIYNSRYQNFSISFWVRIPKHYKPMNHNREYTIINCMGNNNSGWKISLRTVRDCEIIWTLQDTSGNKENLIFRYEELNRISNYINKWIFVTITNNRLGNSRIYINGNLIVEKSISNLGDIHVSDNILFKIVGCDDETYVGIRYFKVFNTELDKTEIETLYSNEPDPSILKNYWGNYLLYNKKYYLFNLLRKDKYITLNSGILNINQQRGVTEGSVFLNYKLYEGVEVIIRKNGPIDISNTDNFVRKNDLAYINVVDRGVEYRLYADTKSEKEKIIRTSNLNDSLGQIIVMDSIGNNCTMNFQNNNGSNIGLLGFHSNNLVASSWYYNNIRRNTSSNGCFWSSISKENGWKE

SEQ ID NO: 19 - protein, 1280 aa, Clostridium botulinum F2
MPVVINSFNYNDPVNDETILYMQKPYEERSRKYYKAFEIMPNVWIMPERDTIGTKPDEFQVPDSLKNGSSAYYDPNYLTTDAEKDRYLKTMIKLFNRINSNPTGKVLLEEVSNARPYLGDDDTLINEFLPVNVTTSVNIKFSTDVESSIISNLLVLGAGPDIFKAYCTPLVRFNKSDKLIEPSNHGFGSINILTFSPEYEHIFNDISGGNHNSTESFIADPAISLAHELIHALHGLYGAKAVTHKESLVAERGPLMIAEKPIRLEEFLTFGGEDLNIIPSAMKEKIYNDLLANYEKIATRLREVNTAPPGYDINEYKDYFQWKYGLDRNADGSYTVNRNKFNEIYKKLYSFTEIDLANKFKVKCRNTYFIKYGFVKVPNLLDDDIYTVSEGFNIGNLAVNNRGQNINLNPKIIDSIPDKGLVEKIIKFCKSIIPRKGTKQSPSLCIRVNNRELFFVASESSYNESDINTPKEIDDTTNLNNNYRNNLDEVILDYNSETIPQISNRTLNTLVQDNSYVPRYDSNGTSEIEEYDVVDFNVFFYLHAQKVPEGETNISLTSSIDTALLEESKVYTFFSSEFIDTINKPVNAALFIDWISKVIRDFTTEATQKSTVDKIADISLIVPYVGLALNIVIEAEKGNFEEAFELLGAGILLEFVPELTIPVILVFTIKSYIDSYENKNKAIKAINNSLIEREAKWKEIYSWIVSNWLTRINTQFNKRKEQMYQALQNQVDAIKTAIEYKYNNYTSDEKNRLESKYNINNIEEELNKKVSLAMKNIERFMTESSISYLMKLINEAEVGKLKEYDKHVKSDLLDYILYHKLILGEQTKELIDLVTSTLNSSIPFELSSYTNDKILIIYFNRLYKKIKDSSILDMRYENNKFIDISGYGSNISINGNVYIYSTNRNQFGIYSGRLSEVNIAQNNDIIYNSRYQNFSISFWVTIPKHYRPMNRNREYTIINCMGNNNSGWKISLRTIRDCEIIWTLQDTSGNKEKLIFRYEELASISDYINKWIFVTITNNRLGNSRIYINGNLIVEKSISNLGDIHVSDNILFKIVGCDDETYVGIRYFKVFNTELDKTEIETLYSNEPDPSILKDYWGNYLLYNKKYYLFNLLRKDKYITRNSGILNINQQRGVTGGISVFLNYKLYEGVEVIIRKNAPIDISNTDNFVRKNDLAYINVVDHGVEYRLYADISITKSEKIIKLIRTSNPNDSLGQIIVMDSIGNNCTMNFQNNDGSNIGLLGFHSDDLVASSWYYNHIRRNTSSNGCFWSFISKEHGWKE

SEQ ID NO: 20 - protein, 1278 aa, Clostridium botulinum F3
MPVVINSFNYNDPVNDDTILYMQIPYEEKSKKYYKAFEIMRNVWIIPERNTIGTDPSDFDPPASLENGSSAYYDPNYLTTDAEKDRYLKTTIKLFKRINSNPAGEVLLQEISYAKPYLGNEHTPINEFHPVTRTTSVNIKSSTNVKSSIILNLLVLGAGPDIFENSSYPVRKLMDSGGVYDPSNDGFGSINIVTFSPEYEYTFNDISGGYNSSTESFIADPAISLAHELIHALHGLYGARGVTYKETIKVKQAPLMIAEKPIRLEEFLTFGGQDLNIITSAMKEKIYNNLLANYEKIATRLSRVNSAPPEYDINEYKDYFQWKYGLDKNADGSYTVNENKFNEIYKKLYSFTEIDLANKFKVKCRNTYFIKYGFLKVPNLLDDDIYTVSEGFNIGNLAVNNRGQNIKLNPKIIDSIPDKGLVEKIVKFCKSVIPRKGTKAPPRLCIRVNNRELFFVASESSYNENDINTPKEIDDTTNLNNNYRNNLDEVILDYNSETIPQISNQTLNTLVQDDSYVPRYDSNGTSEIEEHNVVDLNVFFYLHAQKVPEGETNISLTSSIDTALSEESQVYTFFSSEFINTINKPVHAALFISWINQVIRDFTTEATQKSTFDKIADISLVVPYVGLALNIGNEVQKENFKEAFELLGAGILLEFVPELLIPTILVFTIKSFIGSSENKNKIIKAINNSLMERETKWKEIYSWIVSNWLTRINTQFNKRKEQMYQALQNQVDAIKTVIEYKYNNYTSDERNRLESEYNINNIREELNKKVSLAMENIERFITESSIFYLMKLINEAKVSKLREYDEGVKEYLLDYISEHRSILGNSVQELNDLVTSTLNNSIPFELSSYTNDKILILYFNKLYKKIKDNSILDMRYENNKFIDISGYGSNISINGDVYIYSTNRNQFGIYSSKPSEVNIAQNNDIIYNGRYQNFSISFWVRIPKYFNKVNLNNEYTIIDCIRNNNSGWKISLNYNKIIWTLQDTAGNNQKLVFNYTQMISISDYINKWIFVTITNNRLGNSRIYINGNLIDEKSISNLGDIHVSDNILFKIVGCNDTRYVGIRYFKVFDTELGKTEIETLYSDEPDPSILKDFWGNYLLYNKRYYLLNLLRTDKSITQNSNFLNINQQRGVYQKPNIFSNTRLYTGVEVIIRKNGSTDISNTDNFVRKNDLAYINVVDRDVEYRLYADISIAKPEKIIKLIRTSNSNNSLGQIIVMDSIGNNCTMNFQNNNGGNIGLLGFHSNNLVASSWYYNNIRKNTSSNGCFWSFISKEHGWQEN

SEQ ID NO: 21 - protein, 1297 aa, Clostridium botulinum G
  VARIANT 7: Identity of amino acid is unknown
MPVNIKXFNYNDPINNDDIIMMEPFNDPGPGTYYKAFRIIDRIWIVPERFTYGFQPDQFNASTGVFSKDVYEYYDPTYLKTDAEKDKFLKTMIKLFNRINSKPSGQRLLDMIVDAIPYLGNASTPPDKFAANVANVSINKKIIQPGAEDQIKGLMTNLIIFGPGPVLSDNFTDSMIMNGHSPISEGFGARMMIRFCPSCLNVFNNVQENKDTSIFSRRAYFADPALTLMHELIHVLHGLYGIKISNLPITPNTKEFFMQHSDPVQAEELYTFGGHDPSVISPSTDMNIYNKALQNFQDIANRLNIVSSAQGSGIDISLYKQIYKNKYDFVEDPNGKYSVDKDKFDKLYKALMFGFTETNLAGEYGIKTRYSYFSEYLPPIKTEKLLDNTIYTQNEGFNIASKNLKTEFNGQNKAVNKEAYEEISLEHLVIYRIAMCKPVMYKNTGKSEQCIIVNNEDLFFIANKDSFSKDLAKAETIAYNTQNNTIENNFSIDQLILDNDLSSGIDLPNENTEPFTNFDDIDIPVYIKQSALKKIFVDGDSLFEYLHAQTFPSNIENLQLTNSLNDALRNNNKVYTFFSTNLVEKANTVVGASLFVNWVKGVIDDFTSESTQKSTIDKVSDVSIIIPYIGPALNVGNETAKENFKNAFEIGGAAILMEFIPELIVPIVGFFTLESYVGNKGHIIMTISNALKKRDQKWTDMYGLIVSQWLSTVNTQFYTIKERMYNALNNQSQAIEKIIEDQYNRYSEEDKMNINIDFNDIDFKLNQSINLAINNIDDFINQCSISYLMNRMIPLAVKKLKDFDDNLKRDLLEYIDTNELYLLDEVNILKSKVNRHLKDSIPFDLSLYTKDTILIQVFNNYISNISSNAILSLSYRGGRLIDSSGYGATMNVGSDVIFNDIGNGQFKLNNSENSNITAHQSKFVVYDSMFDNFSINFWVRTPKYNNNDIQTYLQNEYTIISCIKNDSGWKVSIKGNRIIWTLIDVNAKSKSIFFEYSIKDNISDYINKWFSITITNDRLGNANIYINGSLKKSEKILNLDRINSSNDIDFKLINCTDTTKFVWIKDFNIFGRELNATEVSSLYWIQSSTNTLKDFWGNPLRYDTQYYLFNQGMQNIYIKYFSKASMGETAPRTNFNNAAINYQNLYLGLRFIIKKASNSRNINNDNIVREGDYIYLNIDNISDESYRVYVLVNSKEIQTQLFLAPINDDPTFYDVLQIKKYYEKTTYNCQILCEKDTKTFGLFGIGKFVKDYGYVWDTYDNYFCISQWYLRRISENINKLRLGCNWQFIPVDEGWTE

SEQ ID NO: 22 - protein, 1315 aa, Clostridium tetani
MPITINNFRYSDPVNNDTIIMMEPPYCKGLDIYYKAFKITDRIWIVPERYEFGTKPEDFNPPSSLIEGASEYYDPNYLRTDSDKDRFLQTMVKLFNRIKNNVAGEALLDKIINAIPYLGNSYSLLDKFDTNSNSVSFNLLEQDPSGATTKSAMLTNLIIFGPGPVLNKNEVRGIVLRVDNKNYFPCRDGFGSIMQMAFCPEYVPTFDNVIENITSLTIGKSKYFQDPALLLMHELIHVLHGLYGMQVSSHEIIPSKQEIYMQHTYPISAEELFTFGGQDANLISIDIKNDLYEKTLNDYKAIANKLSQVTSCNDPNIDIDSYKQIYQQKYQFDKDSNGQYIVNEDKFQILYNSIMYGFTEIELGKKFNIKTRLSYFSMNHDPVKIPNLLDDTIYNDTEGFNIESKDLKSEYKGQNMRVNTNAFRNVDGSGLVSKLIGLCKKIIPPTNIRENLYNRTASLTDLGGELCIKIKNEDLTFIAEKNSFSEEPFQDEIVSYNTKNKPLNFNYSLDKIIVDYNLQSKITLPNDRTTPVTKGIPYAPEYKSNAASTIEIHNIDDNTIYQYLYAQKSPTTLQRITMTNSVDDALINSTKIYSYFPSVISKVNQGAQGILFLQWVRDIIDDFTNESSQKTTIDKISDVSTIVPYIGPALNIVKQGYEGNFIGALETTGVVLLLEYIPEITLPVIAALSIAESSTQKEKIIKTIDNFLEKRYEKWIEVYKLVKAKWLGTVNTQFQKRSYQMYRSLEYQVDAIKKIIDYEYKIYSGPDKEQIADEINNLKNKLEEKANKAMININIFMRESSRSFLVNQMINEAKKQLLEFDTQSKNILMQYIKANSKFIGITELKKLESKINKVFSTPIPFSYSKNLDCWVDNEEDIDVILKKSTILNLDINNDIISDISGFNSSVITYPDAQLVPGINGKAIHLVNNESSEVIVHKAMDIEYNDMFNNFTVSFWLRVPKVSASHLEQYGTNEYSIISSMKKHSLSIGSGWSVSLKGNNLIWTLKDSAGEVRQITFRDLPDKFNAYLANKWVFITITNDRLSSANLYINGVLMGSAEITGLGAIREDNNITLKLDRCNNNNQYVSIDKFRIFCKALNPKEIEKLYTSYLSITFLRDFWGNPLRYDTEYYLIPVASSSKDVQLKNITDYMYLTNAPSYTNGKLNIYYRRLYNGLKFIIKRYTPNNEIDSFVKSGDFIKLYVSYNNNEHIVGYPKDGNAFNNLDRILRVGYNAPGIPLYKKMEAVKLRDLKTYSVQLKLYDDKNASLGLVGTHNGQIGNDPNRDILIASNWYFNHLKDKILGCDWYFVPTDEGWTND

SEQ ID NO: 23 - protein, 1268 aa, Clostridium baratii
MPVNINNFNYNDPINNTTILYMKMPYYEDSNKYYKAFEIMDNVWIIPERNIIGKKPSDFYPPISLDSGSSAYYDPNYLTTDAEKDRFLKTVIKLFNRINSNPAGQVLLEEIKNGKPYLGNDHTAVNEFCANNRSTSVEIKESNGTTDSMLLNLVILGPGPNILECSTFPVRIFPNNIAYDPSEKGFGSIQLMSFSTEYEYAFNDNTDLFIADPAISLAHELIHVLHGLYGAKGVTNKKVIEVDQGALMAAEKDIKIEEFITFGGQDLNIITNSTNQKIYVILLSNYTAIASRLSQVNRNNSALNTTYYKNFFQWKYGLDQDSNGNYTVNISKFNAIYKKLFSFTECDLAQKFQVKNRSNYLFHFKPFRLLDLLDDNIYSISEGFNIGSLRVNNNGQNINLNSRIVGPIPDNGLVERFVGLCKSIVSKKGTKNSLCIKVNNRDLFFVASESSYNENGINSPKEIDDTTITNNNYKKNLDEVILDYNSDAIPNLSSRLLNTTAQNDSYVPKYDSNGTSEIKEYTVDKLNVFFYLYAQKAPEGESAISLTSSVNTALLDASKVYTFFSSDFINTVNKPVQAALFISWIQQVINDFTTEATQKSTIDKIADISLIVPYVGLALNIGNEVQKGNFKEAIELLGAGILLEFVPELLIPTILVFTIKSFINSDDSKNKIIKAINNALRERELKWKEVYSWIVSNWLTRINTQFNKRKEQMYQALQNQVDGIKKIIEYKYNNYTLDEKNRLRAEYNIYSIKEELNKKVSLAMQNIDRFLTESSISYLMKLINEAKINKLSEYDKRVNQYLLNYILENSSTLGTSSVPELNNLVSNTLNNSIPFELSEYTNDKILIHILIRFYKRIIDSSILNMKYENNRFIDSSGYGSNISINGDIYIYSTNRNQFGIYSSRLSEVNITQNNTIIYNSRYQNFSVSFWVRIPKYNNLKNLNNEYTIINCMRNNNSGWKISLNYNNIIWTLQDTTGNNQKLVFNYTQMIDISDYINKWTFVTITNNRLGHSKLYINGNLTDQKSILNLGNIHVDDNILFKIVGCNDTRYVGIRYFKIFNMELDKTEIETLYHSEPDSTILKDFWGNYLLYNKKYYLLNLLKPNMSVTKNSDILNINRQRGIYSKTNIFSNARLYTGVEVIIRKVGSTDTSNTDNFVRKNDTVYINVVDGNSEYQLYADVSTSAVEKTIKLRRISNSNYNSNQMIIMDSIGDNCTMNFKTNNGNDIGLLGFHLNNLVASSWYYKNIRNNTRNNGCFWSFISKEHGWQE

SEQ ID NO: 24 - protein, 1251 aa, Clostridium butyricum 1
MPTINSFNYNDPVNNRTILYIKPGGCQQFYKSFNIMKNIWIIPERNVIGTIPQDFLPPTSLKNGDSSYYDPNYLQSDQEKDKFLKIVTKIFNRINDNLSGRILLEELSKANPYLGNDNTPDGDFIINDASAVPIQFSNGSQSILLPNVIIMGAEPDLFETNSSNISLRNNYMPSNHGFGSIAIVTFSPEYSFRFKDNSMNEFIQDPALTLMHELIHSLHGLYGAKGITTKYTITQKQNPLITNIRGTNIEEFLTFGGTDLNIITSAQSNDIYTNLLADYKKIASKLSKVQVSNPLLNPYKDVFEAKYGLDKDASGIYSVNINKFNDIFKKLYSFTEFDLATKFQVKCRQTYIGQYKYFKLSNLLNDSIYNISEGYNINNLKVNFRGQNANLNPRIITPITGRGLVKKIIRFCKNIVSVKGIRKSICIEINNGELFFVASENSYNDDNINTPKEIDDTVTSNNNYENDLDQVILNFNSESAPGLSDEKLNLTIQNDAYIPKYDSNGTSDIEQHDVNELNVFFYLDAQKVPEGENNVNLTSSIDTALLEQPKIYTFFSSEFINNVNKPVQAALFVGWIQQVLVDFTTEANQKSTVDKIADISIVVPYIGLALNIGNEAQKGNFKDALELLGAGILLEFEPELLIPTILVFTIKSFLGSSDNKNKVIKAINNALKERDEKWKEVYSFIVSNWMTKINTQFNKRKEQMYQALQNQVNALKAIIESKYNSYTLEEKNELTNKYDIEQIENELNQKVSIAMNNIDRFLTESSISYLMKLINEVKINKLREYDENVKTYLLDYIIKHGSILGESQQELNSMVIDTLNNSIPFKLSSYTDDKILISYFNKFFKRIKSSSVLNMRYKNDKYVDTSGYDSNININGDVYKYPTNKNQFGIYNDKLSEVNISQNDYIIYDNKYKNFSISFWVRIPNYDNKIVNVNNEYTIINCMRDNNSGWKVSLNHNEIIWTLQDNSGINQKLAFNYGNANGISDYINKWIFVTITNDRLGDSKLYINGNLIDKKSILNLGNIHVSDNILFKIVNCSYTRYIGIRYFNIFDKELDETEIQTLYNNEPNANILKDFWGNYLLYDKEYYLLNVLKPNNFINRRTDSTLSINNIRSTILLANRLYSGIKVKIQRVNNSSTNDNLVRKNDQVYINFVASKTHLLPLYADTATTNKEKTIKISSSGNRFNQVVVMNSVGNCTMNFKNNNGNNIGLLGFKADTVVASTWYYTHMRDNTNSNGFFWNFISEEHGWQEK

SEQ ID NO: 25 - protein, 1251 aa, Clostridium butyricum 2
MPKINSFNYNDPVNDRTILYIKPGGCQEFYKSFNIMKNIWIIPERNVIGTTPQDFHPPTSLKNGDSSYYDPNYLQSDEEKDRFLKIVTKIFNRINNNLSGGILLEELSKANPYLGNDNTPDNQFHIGDASAVEIKFSNGSQDILLPNVIIMGAEPDLFETNSSNISLRNNYMPSNHGFGSIAIVTFSPEYSFRFNDNSMNEFIQDPALTLMHELIHSLHGLYGAKGITTKYTITQKQNPLITNIRGTNIEEFLTFGGTDLNIITSAQSNDIYTNLLADYKKIASKLSKVQVSNPLLNPYKDVFEAKYGLDKDASGIYSVNINKFNDIFKKLYSFTEFDLATKFQVKCRQTYIGQYKYFKLSNLLNDSIYNISEGYNINNLKVNFRGQNANLNPRIITPITGRGLVKKIIRFCKNIVSVKGIRKSICIEINNGELFFVASENSYNDDNINTPKEIDDTVTSNNNYENDLDQVILNFNSESAPGLSDEKLNLTIQNDAYIPKYDSNGTSDIEQHDVNELNVFFYLDAQKVPEGENNVNLTSSIDTALLEQPKIYTFFSSEFINNVNKPVQAALFVSWIQQVLVDFTTEANQKSTVDKIADISIVVPYIGLALNIGNEAQKGNFKDALELLGAGILLEFVPELLIPTILVFTIKSFLGSSDNKNKVIKAINNALKERDEKWKEVYSFIVSNWMTKINTQFNKRKEQMYQALQNQVNALKTIIEFKYNSYTLEEKKELKNNYDIEQIENELNQKVSIAMNNIDRFLTESSISYLMKLINEVKINKLREYDENVKTYLLDYIIQHGSILGESQQELNSMVIDTLNNSIPFKLSSYTDDKILISYFNKFFKRIKSSSVLNMRYKNDKYVDTSGYDSNININGEIFIYPTNKNQFTIFNSKPSEVNISQNDYIIYDNKYKNFSISFWVRIPNYDNKIVNINNEYTIINCMRDNNSGWKVSLNHNEIIWTLQDNARINQKLVFKYGNANGISDYINKWIFVTITNDRLGDSKLYINGHLIDQKSILNLGNIHVSDNILFKIVNCSYTRYIGIRYFNIFDKELDETEIQTLYSNEPNTNILKDFWGNYLLYDKGYYLLNVLKPNNFIDRRKDSTLSINNIRSTILLANRLYSGIKVKIQRVNDSSTNDRFVRKNDQVYINYISNSSSYSLYADTNTTDKEKTIKSSSSGNRFNQVVVMNSVGNNCTMNFKNNNGNNIGLLGFKADTVVASTWYYTHMRDHTNSNGCFWNFISEEHGWQEK

SEQ ID NO: 26 - protein, 25 aa, Artificial Sequence
  BoNT/A di-chain loop region
CVRGIITSKTKSLDKGYNKALNDLC

SEQ ID NO: 27 - protein, 10 aa, Artificial Sequence
  BoNT/B di-chain loop region
CKSVKAPGIC

SEQ ID NO: 28 - protein, 17 aa, Artificial Sequence
  BoNT/C1 di-chain loop region
CHKAIDGRSLYNKTLDC

SEQ ID NO: 29 - protein, 14 aa, Artificial Sequence
  BoNT/D di-chain loop region
CLRLTKNSRDDSTC

SEQ ID NO: 30 - protein, 15 aa, Artificial Sequence
  BoNT/E di-chain loop region
CKNIVSVKGIRKSIC

SEQ ID NO: 31 - protein, 17 aa, Artificial Sequence
  BoNT/F di-chain loop region
CKSVIPRKGTKAPPRLC

SEQ ID NO: 32 - protein, 15 aa, Artificial Sequence
  BoNT/G di-chain loop region
CKPVMYKNTGKSEQC

SEQ ID NO: 33 - protein, 29 aa, Artificial Sequence
  TeNT di-chain loop region
CKKIIPPTNIRENLYNRTASLTDLGGELC

SEQ ID NO: 34 - protein, 15 aa, Artificial Sequence
  BaNT di-chain loop region
CKSIVSKKGTKNSLC

SEQ ID NO: 35 - protein, 15 aa, Artificial Sequence
  BuNT di-chain loop region
CKNIVSVKGIRKSIC

SEQ ID NO: 36 - protein, 5 aa, Artificial Sequence
  Bovine enterokinase protease cleavage site
DDDDK

SEQ ID NO: 37 - protein, 7 aa, Artificial Sequence
  Tobacco Etch Virus protease cleavage site consensus sequence
  VARIANT 2, 3,  5: Xaa can be any amino amino acid
EXXYXQG

SEQ ID NO: 38 - protein, 7 aa, Artificial Sequence
  Tobacco Etch Virus protease cleavage site consensus sequence
  VARIANT 2, 3, 5: Xaa can be any amino acid
EXXYXQS

SEQ ID NO: 39 - protein, 7 aa, Artificial Sequence
  Tobacco Etch Virus protease cleavage site
ENLYFQG

SEQ ID NO: 40 - protein, 7 aa, Artificial Sequence
  Tobacco Etch Virus protease cleavage site
ENLYFQS

SEQ ID NO: 41 - protein, 7 aa, Artificial Sequence
  Tobacco Etch Virus protease cleavage site
ENIYTQG

SEQ ID NO: 42 - protein, 7 aa, Artificial Sequence
  Tobacco Etch Virus protease cleavage site
ENIYTQS

SEQ ID NO: 43 - protein, 7 aa, Artificial Sequence
  Tobacco Etch Virus protease cleavage site
ENIYLQG

SEQ ID NO: 44 - protein, 7 aa, Artificial Sequence
  Tobacco Etch Virus protease cleavage site
ENIYLQS

SEQ ID NO: 45 - protein, 7 aa, Artificial Sequence
  Tobacco Etch Virus protease cleavage site
ENVYFQG

SEQ ID NO: 46 - protein, 7 aa, Artificial Sequence
  Tobacco Etch Virus protease cleavage site
ENVYSQS

SEQ ID NO: 47 - protein, 7 aa, Artificial Sequence
  Tobacco Etch Virus protease cleavage site
ENVYSQG

SEQ ID NO: 48 - protein, 7 aa, Artificial Sequence
  Tobacco Etch Virus protease cleavage site
ENVYSQS

SEQ ID NO: 49 - protein, 7 aa, Artificial Sequence
  Tobacco Vein Mottling Virus protease cleavage site consensus sequence
  VARIANT 1, 2: Xaa can be any amino acid
XXVRFQG

SEQ ID NO: 50 - protein, 7 aa, Artificial Sequence
  Tobacco Vein Mottling Virus protease cleavage site consensus sequence
  VARIANT 1, 2: Xaa can be any amino acid
XXVRFQS

SEQ ID NO: 51 - protein, 7 aa, Artificial Sequence
  Tobacco Vein Mottling Virus protease cleavage site
ETVRFQG

SEQ ID NO: 52 - protein, 7 aa, Artificial Sequence
  Tobacco Vein Mottling Virus protease cleavage site
ETVRFQS

SEQ ID NO: 53 - protein, 7 aa, Artificial Sequence
  Tobacco Vein Mottling Virus protease cleavage site
NNVRFQG

SEQ ID NO: 54 - protein, 7 aa, Artificial Sequence
  Tobacco Vein Mottling Virus protease cleavage site
NNVRFQS

SEQ ID NO: 55 - protein, 7 aa, Artificial Sequence
  Human Rhinovirus 3C protease cleavage site consensus sequence
  VARIANT 1: Xaa can be any amino acid, with D or E preferred
  VARIANT 2: Xaa can be G, A, V, L, I, M, S or T
XXLFQGP

SEQ ID NO: 56 - protein, 7 aa, Artificial Sequence
  Human Rhinovirus 3C protease cleavage site
EALFQGP

SEQ ID NO: 57 - protein, 7 aa, Artificial Sequence
  Human Rhinovirus 3C protease cleavage site
EVLFQGP

SEQ ID NO: 58 - protein, 7 aa, Artificial Sequence
  Human Rhinovirus 3C protease cleavage site
ELLFQGP

SEQ ID NO: 59 - protein, 7 aa, Artificial Sequence
  Human Rhinovirus 3C protease cleavage site
DALFQGP

SEQ ID NO: 60 - protein, 7 aa, Artificial Sequence
  Human Rhinovirus 3C protease cleavage site
DVLFQGP

SEQ ID NO: 61 - protein, 7 aa, Artificial Sequence
  Human Rhinovirus 3C protease cleavage site
DLLFQGP

SEQ ID NO: 62 - protein, 6 aa, Artificial Sequence
  Subtilisin cleavage site consensus sequence
  VARIANT 1, 2, 3, 4: Xaa can be any amino acid
XXXXHY

SEQ ID NO: 63 - protein, 6 aa, Artificial Sequence
  Subtilisin cleavage site consensus sequence
  VARIANT 1, 2, 3, 4: Xaa can be any amino acid
XXXXYH

SEQ ID NO: 64 - protein, 2 aa, Artificial Sequence
  Subtilisin cleavage site
HY

SEQ ID NO: 65 - protein, 2 aa, Artificial Sequence
  Subtilisin cleavage site
YH

SEQ ID NO: 66 - protein, 6 aa, Artificial Sequence
  Subtilisin cleavage site
PGAAHY

SEQ ID NO: 67 - protein, 6 aa, Artificial Sequence
  Hydroxylamine cleavage site
NGNGNG

SEQ ID NO: 68 - protein, 2 aa, Artificial Sequence
  Hydroxylamine cleavage site
NG

SEQ ID NO: 69 - protein, 5 aa, Artificial Sequence
  SUMO/ULP-1 protease cleavage site consensus sequence
  VARIANT 3, 4, 5: Xaa can be any amino acid
GGXXX

SEQ ID NO: 70 - protein, 98 aa, Artificial Sequence
  SUMO/ULP-1 protease cleavage site
MADSEVNQEAKPEVKPEVKPETHINLKVSDGSSEIFFKIKKTTPLRRLMEAFAKRQGKEMDSLRFLYDGIRIQADQTPEDLDMEDNDIIEAHREQIGG

SEQ ID NO: 71 - protein, 5 aa, Artificial Sequence
  Caspase 3 protease cleavage site consensus sequence
  VARIANT 2: Xaa can be any amino acid with E preferred
  VARIANT 3: Xaa can be any amino acid
  VARIANT 5: Xaa can be any amino acid with G or S preferred
DXXDX

SEQ ID NO: 72 - protein, 5 aa, Artificial Sequence
  Caspase 3 protease cleavage site
DEVDG

SEQ ID NO: 73 - protein, 5 aa, Artificial Sequence
  Caspase 3 protease cleavage site
DEVDS

SEQ ID NO: 74 - protein, 5 aa, Artificial Sequence
  Caspase 3 protease cleavage site
DEPDG

SEQ ID NO: 75 - protein, 5 aa, Artificial Sequence
  Caspase 3 protease cleavage site
DEPDS

SEQ ID NO: 76 - protein, 5 aa, Artificial Sequence
  Caspase 3 protease cleavage site
DELDG

SEQ ID NO: 77 - protein, 5 aa, Artificial Sequence
  Caspase 3 protease cleavage site
DELDS

SEQ ID NO: 78 - protein, 4 aa, Artificial Sequence
  Flexible G-spacer
GGGG

SEQ ID NO: 79 - protein, 5 aa, Artificial Sequence
  Flexible G-spacer
GGGGS

SEQ ID NO: 80 - protein, 4 aa, Artificial Sequence
  Flexible A-spacer
AAAA

SEQ ID NO: 81 - protein, 5 aa, Artificial Sequence
  Flexible A-spacer
AAAAV

SEQ ID NO: 82 - protein, 77 aa, Homo sapiens
MNLRLCVQALLLLWLSLTAVCGGSLMPLPDGNGLEDGNVRHLVQPRGSRNGPGPWQGGRRKFRRQRPRLSHKGPMPF

SEQ ID NO: 83 - protein, 77 aa, Macaca mulatta
MNLRLCVQALLLLWLSLTAVCGGPLMQLPYGNGLEEGNVRHLVQPRGSRNGPGPWQGGRRKFRRQRPRLSHKGPMPF

SEQ ID NO: 84 - protein, 77 aa, Bos taurus
MNLRRCVQALLLLWLCLSAVCGGPLLQTSDGKEMEEGTIRYLVQPRGPRSGPGPWQGGRRKFRRQRPRLSHKGPMPF

SEQ ID NO: 85 - protein, 77 aa, Mus musculus
MNLRLCVQALLLLWLSLTAVCGVPLMLPPDGTGLEEGSMRYLVKPRTSRTGPGAWQGGRRKFRRQRPRLSHKGPMPF

SEQ ID NO: 86 - protein, 77 aa, Rattus norvegicus
MNLSFCVQALLLLWLSLTAVCGVPLMLPPDGKGLEEGNMRYLVKPRTSRTGPGAWQGGRRKFRRQRPRLSHKGPMPF

SEQ ID NO: 87 - protein, 76 aa, Xenopus laevis
MNLRLWALALLLFILTLTSAFGAPLAEGSDRNDEEQNIRTLVNPKMVRNSAPQRQANRRKLIRQRPRLSHKGPMPF

SEQ ID NO: 88 - protein, 77 aa, Danio rerio
MNVKILTLVIVLVVSLLCSASAGPMASTEHSKEIEEVGSMRTPLRQNPARAGRSQRPAGWRRRRPRPRLSHKGPMPF

SEQ ID NO: 89 - protein, 764 aa, Bacillus anthracis
MKKRKVLIPLMALSTILVSSTGNLEVIQAEVKQENRLLNESESSSQGLLGYYFSDLNFQAPMVVTSSTTGDLSIPSSELENIPSENQYFQSAIWSGFIKVKKSDEYTFATSADNHVTMWVDDQEVINKASNSNKIRLEKGRLYQIKIQYQRENPTEKGLDFKLYWTDSQNKKEVISSDNLQLPELKQKSSNSRKKRSTSAGPTVPDRDNDGIPDSLEVEGYTVDVKNKRTFLSPWISNIHEKKGLTKYKSSPEKWSTASDPYSDFEKVTGRIDKNVSPEARHPLVAAYPIVHVDMENIILSKNEDQSTQNTDSQTRTISKNTSTSRTHTSEVHGNAEVHASFFDIGGSVSAGFSNSNSSTVAIDHSLSLAGERTWAETMGLNTADTARLNANIRYVNTGTAPIYNVLPTTSLVLGKNQTLATIKAKENQLSQILAPNNYYPSKNLAPIALNAQDDFSSTPITMNYNQFLELEKTKQLRLDTDQVYGNIATYNFENGRVRVDTGSNWSEVLPQIQETTARIIFNGKDLNLVERRIAAVNPSDPLETTKPDMTLKEALKIAFGFNEPNGNLQYQGKDITEFDFNFDQQTSQNIKNQLAELNATNIYTVLDKIKLNAKMNILIRDKRFHYDRNNIAVGADESVVKEAHREVINSSTEGLLLNIDKDIRKILSGYIVEIEDTEGLKEVINDRYDMLNISSLRQDGKTFIDFKKYNDKLPLYISNPNYKVNVYAVTKENTIINPSENGDTSTNGIKKILIFSKKGYEIG

SEQ ID NO: 90 - protein, 714 aa, Homo sapiens
MASEAPSPPRSPPPPTSPEPELAQLRRKVEKLERELRSCKRQVREIEKLLHHTERLYQNAESNNQELRTQVEELSKILQRGRNEDNKKSDVEVQTENHAPWSISDYFYQTYYNDVSLPNKVTELSDQQDQAIETSILNSKDHLQVENDAYPGTDRTENVKYRQVDHFASNSQEPASALATEDTSLEGSSLAESLRAAAEAAVSQTGFSYDENTGLYFDHSTGFYYDSENQLYYDPSTGIYYYCDVESGRYQFHSRVDLQPYPTSSTKQSKDKKLKKKRKDPDSSATNEEKDLNSEDQKAFSVEHTSCNEEENFANMKKKAKIGIHHKNSPPKVTVPTSGNTIESPLHENISNSTSFKDEKIMETDSEPEEGEITDSQTEDSYDEAITSEGNVTAEDSEDEDEDKIWPPCIRVIVIRSPVLQIGSLFIITAVNPATIGREKDMEHTLRIPEVGVSKFHAEIYFDHDLQSYVLVDQGSQNGTIVNGKQILQPKTKCDPYVLEHGDEVKIGETVLSFHIHPGSDTCDGCEPGQVRAHLRLDKKDESFVGPTLSKEEKELERRKELKKIRVKYGLQNTEYEDEKTLKNPKYKDRAGKRREQVGSEGTFQRDDAPASVHSEITDSNKGRKMLEKMGWKKGEGLGKDGGGMKTPIQLQLRRTHAGLGTGKPSSFEDVHLLQNKNKKNWDKARERFTENFPETKPQKDDPGTMPWVKGTLE

SEQ ID NO: 91 - protein, 399 aa, Homo sapiens
MKKKAKIGIHHKNSPPKVTVPTSGNTIESPLHENISNSTSFKDEKIMETDSEPEEGEITDSQTEDSYDEAITSEGNVTAEDSEDEDEDKIWPPCIRVIVIRSPVLQIGSLFIITAVNPATIGREKDMEHTLRIPEVGVSKFHAEIYFDHDLQSYVLVDQGSQNGTIVNGKQILQPKTKCDPYVLEHGDEVKIGETVLSFHIHPGSDTCDGCEPGQVRAHLRLDKKDESFVGPTLSKEEKELERRKELKKIRVKYGLQNTEYEDEKTLKNPKYKDRAGKRREQVGSEGTFQRDDAPASVHSEITDSNKGRKMLEKMGWKKGEGLGKDGGGMKTPIQLQLRRTHAGLGTGKPSSFEDVHLLQNKNKKNWDKARERFTENFPETKPQKDDPGTMPWVKGTLE

SEQ ID NO: 92 - protein, 710 aa, Macaca mulatta
MASEAPSPPPPTSPEPELAQLRRKVEKLERELRSCKRQVREIEKLLHHTERLYQNAESNNQELRTQVEELSKILQRGRNEDNKKSDVEVQTENHAPWSISDYYYQTYYNDVSLPGKVTELSDQQDQDIETSTLNSKDHLQIENDAYPGTDKTENVKCRQVDHFASNSQEPASALATEDTSLEGSSLAESLRAAAEAAVSQTGFSYDENTGLYFDHSTGFYYDSENQLYYDPSTGIYYYCDVESGRYQFHSRVDLQPYQTSSTKQSKDKKLKKKRKDPDSSATNEEKDLNSEDQKAFSVEHTSCNEEENIANMKKKAKIGIHHKNSLPKFTVPASGNTIESPLHEDISNSTSFKDEKIMETDSEPEEGEITDSQTEDSYDEDITSEGNVTAEDSEDEDEDKIWPPCIRVIVIRSPVLQTGSLFIITAVNPATIGREKDMEHTLRIPEVGVSKFHAEIYFDHDLQSYVLVDQGSQNGTVVNGKQILQPKTKCDPYVLEHGDEVKIGETVLSFHIHPGSDTCDGCEPGQVRAHLRLDKKDESFVGPTLSKEEKELERRKELKKIRVKYGLQNTEYEDEKTLKNPKYKDRAGKRREQIGSEGTFQRDDAPASVHSEITDSNKGRKMLEKMGWKKGEGLGKDGGGMKTPIQLQLRRTHAGLGTGKPSSIEDVHLLQNKNKKNWDKARERFTENFPETKPQKDDPGTMPWVKGTLE

SEQ ID NO: 93 - protein, 714 aa, Pongo abelii
MASEAPSPPRSPLPPTSPEPELAQLRRKVEKLERELRSCKRQVREIEKLLHHTERLYQNAESNNQELRTQVEELSKILQRGRNEDNKKSDVEVQTENHAPWSISDYYYQTYYNDVSLPNKVTELSDQQDQAIETSTLSSKDHLQVENDAYPGTDRTENVKCRQVDHFASNSQEPASALATEDTSLEGSSLAESLRAAAEAAVSQTGFSYDENTGLYFDHSTGFYYDSENQLYYDPSTGIYYYCDVESGRYQFHSRVDLQPYQTSSTKQSKDKKLKKKRKDPDSSATNEEKDLNSEDQKTFSVEHTSCSEEENFANMKKKAKIGIHHKNSPPKVTVPTSGNTIESPLHENISKSTSFRDEKIMETDSEPEEGEITDSQTEDSYDEDITSEGNVTAEDSEDEDEDKIWPPCIRVIVIRSPVLQIGSLFIITAVNPATIGREKDMEHTLRIPEVGVSKFHAEIYFDRDLQSYVLVDQGSQNGTIVNGKQILQPKTKCDPYVLEHGDEVKIGETVLSFHIHPGSDTCDGCEPGQVRAHLRLDKKDESFVGPTLSKEEKELERRKELKKIRVKYGLQNTEYEDEKTLKNPKYKDRAGKRREQVGSEGTFQRDDAPASVHSEITDSNKGRKMLEKMGWKKGEGLGKDGGGMKTPIQLQLRRTHAGLGTGKPSSIEDIHLLQNKNKKNWDKARERFTENFPETKPQKDDPGTMPWVKGTLE

SEQ ID NO: 94 - protein, 712 aa, Bos taurus
MASEAPPPSLSPSPPPSPEPELAQLRRKVETLERELRSCKRQVREIEKLLHHTERLYQSAESNNQELRTQVEELSKILHCGRNEDNKKSDVEVQTENHPPWSISDYYYQTYYNEVNLPNKASELSVQEDKDIEASTFSSKDQSRIENDTYAGTDITENLGQEDHFASNSQEPASALATENASLEGSSLAESLRAAAEAAVSQTGFSYDENTGLYFDHSTGFYYDSENQLYYDPSTGIYYYCDVESGRYQFHSRVDLQPYQTSGTKQSKDKKLKKKRKDPASSTTNEEKNLNSEDQKTSSIEHISCSEGEDFANVKKKAKVDIHYKNSPPKYTVPVSAKTVESPLNENIYNSASFKDEKIIDTDSEPEEGEITDSQTEDSSDEDLTSEDNATAEDTEDEDEEKIWPPCIRVIVIRSPVLQTGSLFIITAVNPATIGREKDMEHTLRIPEVGVSKFHAEIYFDHDLQSYVLVDQGSQNGTVVNGKQILQPKTKCDPYVLEHGDEVKIGETVLSFHIHPGSDTCDGCEPGQVRAHLRLDKKDELFVGPALSKEEKELERRKELKKIRVKYGLQNTDYEDEKTLKNPKYKDRAGKRREQIGSEGTFQRDDAPASVHSEITDSNKGRKMLEKMGWKKGEGLGKDGGGMKTPIQLQLRRTHAGLGTGKPSSIEDVQLLQNKSKKNWEKARERFAENFPEAKSQKDAPGTVPWVKGAVE

SEQ ID NO: 95 - protein, 711 aa, Mus musculus
MASEAPSPPSPSPPPPASPEPELAQLRRKVEKLERELRSCRRQVREVEKLLQHTERLYRNAESDNQELRTQVEELSKILHCGKNEDNPKSDVEVQTESQAPWAISDYYYQTCYNDDSLPSKETELCVQQSQCAQASALDPQDESHIDSGSYAGADATEGVSHRQEDAVTSDSQESVSALAEGPALEGSSLAESLRAAAEAAVSQTGFTYDESTGLYFDHSTGFYYDSENQLYYDPSTGIYYYCDVESGRYQFHSRVDLQPYQTSSTKPNRERRLKKRRKEPGFYTANEEKDLSSEDQKVCSVEYINCSEDEHSGNVKKKARTDTSHKSSPLQLTVAVSGDTVESPGDDNSASSKDERIGESESEPEEGEITDSQSEKSYDGDSSSGDRETSEESDDEDEERIWPPCIRVIVIRSPVLQMGSLFIITAVSPATIGREKDMEHTVRIPEVAVSKFHAEVYFDHDLQSYVLVDQGSQNGTIVNGKQILQPKTKCDPYVLEHGDEVKIGETVLSFHIHPGSETCDGCEPGQVRAHLRLDRKDEPLVGPALSKEEKELERRKALKKIRVKYGLQNTDYEAEKALKNPKYKDRAGKRREQVGSEGTFQRDDAPASVHSEITDSNKGRKMLEKMGWKRGEGLGKDGGGMKTPIQLQLRRTHAGLGTGKLSSIDDVHLIQNKSKKHWDKARERFAETFTENKPRKETPGAVPWVTGTAE

SEQ ID NO: 96 - protein, 705 aa, Rattus norvegicus
MASEAPSPPPASPEPELAQLRRKVEKLERELRSCKRQVREVEKLLHHTERLYQNAESNNQELRTQVEELSKILRCGKNEDNQKSDVEVQTESHAAWSSSDYYYQTYYKDDNLPSKETELCAQQSPYVQASALDSKAESRIDSESYSTEMAESVNHRHEDHFTSDSQESASALAEGSALEGSSLAESLRAAAEAAVSQTSFTYDESTGLYFDHSTGFYYDSENQLYYDASTGIYYYCDVESGRYQFHSRVHLQPYQTSSTKPSKDKKLKKRRKEPGFWTATEEKDLSSEDQKVCSIEYINCSEDENSGNVKKKARTDTSHKSSPLPLAGAVSGDMVESPGVEASASLKDERERASESEPEEGEITDSQSECSYDGDPSSGDRQSSEESDDEDDEEKIWPPCIRVIVIRSPVLQMGSLFIITAVSPATIGREKDMEHTVRIPEVAVSKFHAEVYFDHDLQSYVLVDQGSQNGTIVNGKQILQPKTKCDPYILEHGDEVKIGETVLSFHIHPGSETCDGCEPGQVRAHLRLDKKDEPLVGPALSKEEKELERRKALKKIRVKYGLQNTDYEDEKALKNPKYKDRAGKRREQVGSEGTFQRDDAPASVHSEITDSNKGRKMLEKMGWKKGEGLGKDGGGMKTPIQLQLRRTHAGLGTGKPSSIDDVHFLQNKSKKNWDKARERFAENFTEKKACKEAPGPIPWVTGTAE

SEQ ID NO: 97 - protein, 709 aa, Xenopus tropicalis
MVRHGELPTAESSDPAELSPLPTAPVTLQPDTLQVPSSWESPEGSPKASPLPQGPESALAPSGDTTAALCLRVRTLEAELETCRQELRDIQRRLSHSERLHRCTETRNLELQKQVEQLSRELHERKRAEQTAQEVQTDGYYGWAQSDYCSSGNDYSGFAPGMSEQVSVTEDSNSSQVVAEAVLNKAGASSGQFVEEVQEDTVYAQQAEEEQGCSLADSLRATAEAAVTQTGFVYDENTGMYYDHSTGFYYDSESQLYYDGTTGIYYYCDVDSGRYLYHSRVDLQSFTDTNPQPTKDKRSKKKRRDPASMEKEEEKEKDTEKMEHEPVSPPEREELAAERKKARMGSLVESYERESSSSDESEPEEGEITDSDNEKTSSDDDRSSGLSVTSHTSEPEDPERIWPPCIRVTVVRSPVLQKGTLFIITADKTATIGREKDLGHTIRIPELGISKFHAEVYFDHNLQSYVLVDQGSQNGTVINGNHILQPKEVSQPCVLQHGDEVKFGETVLSFHVHPGSETCDGCEPGQVRAHLRLNKKEEHSAGPVLTKEGKELLRKQGLKKIRAKYGLQSADYEDNKVLTNPKYKDRAGRRRQVVGSDGTFQKEEAPASVHVEINDNNKGRKMLEKMGWKKGEGLGKSSDGIRDPIQLQLRKKKAGLGAQNPTSIEDIQPTTQNKKNWEKARERYAEAFPDAKTKNETKTSVTWIKGSIE

SEQ ID NO: 98 - protein, 774 aa, Danio rerio
MRAQGSRERARKTGGLNRLNVLSMAAEGKADLEAGDDGLESEIVSLRTQAEALREELKTCKDELQKLQKQLSQSERLQKTTESYNEDLRQQVDKLSAEIHERKKRDKEKVDAETQTEEYTWTETDYYNYYYGGYYQSETTAEQGTTAETQENVVKETQEASVYVEEQHPRIAETSVANPEQPNETSDIPQTEEASGEAGSIADMLRATAEEAMNQTNFVFDESSGMYYDHSTGFYYDSSSQLYYDANTGMYYYYDPESGKYQFHSRIEVPAALHPEVEQTPQRKTKDRKNRKSVKNTERASCPDGGGNKEVVLEIDKLSENHHRGKKDDAGSFKKGRKSRSRSPQRSRRTKSRDRSRKRSTNRKKTRRRSEDSDDSRCSRRKENGSNSEDKRKKTKKKRALRDRKSGSDEGSSESEPEEGEITESDGENHSCSVSSSSVSSIQKTLDSPDEEMEMETQMQEEAWPPCVRVTVVRSPVLQTGTLFILTADTVATIGREKDMNHAIRIPEMGVSKSHAEVYFDQDQQCYMLIDQGSQNGTVLNGNRILQPKVRCDPCPLTHGDELKMGETVLSFHIHAGTATCDGCEPGQIIAHLSRHKKDESSGAVLSKEDKEAQRQKELKMMKVKYGLKSSDYEEQKPLKNSKYKDRAENRRQTVGSEGKFQRDDAPASVHVEIGDENKGRQMLEKMGWKRGEGLGKDGAGIKDPIQLHMRKAQSGLGSSGSAMSVEDASLTKSKTQRNWERARERFSEACHTDSSHPENSQSPKAWVKSQETE

SEQ ID NO: 99 - protein, 497 aa, Homo sapiens
MTVFLSFAFLAAILTHIGCSNQRRSPENSGRRYNRIQHGQCAYTFILPEHDGNCRESTTDQYNTNALQRDAPHVEPDFSSQKLQHLEHVMENYTQWLQKLENYIVENMKSEMAQIQQNAVQNHTATMLEIGTSLLSQTAEQTRKLTDVETQVLNQTSRLEIQLLENSLSTYKLEKQLLQQTNEILKIHEKNSLLEHKILEMEGKHKEELDTLKEEKENLQGLVTRQTYIIQELEKQLNRATTNNSVLQKQQLELMDTVHNLVNLCTKEVLLKGGKREEEKPFRDCADVYQAGFNKSGIYTIYINNMPEPKKVFCNMDVNGGGWTVIQHREDGSLDFQRGWKEYKMGFGNPSGEYWLGNEFIFAITSQRQYMLRIELMDWEGNRAYSQYDRFHIGNEKQNYRLYLKGHTGTAGKQSSLILHGADFSTKDADNDNCMCKCALMLTGGWWFDACGPSNLNGMFYTAGQNHGKLNGIKWHYFKGPSYSLRSTTMMIRPLDF

SEQ ID NO: 100 - protein, 498 aa, Sus scrofa
MTVFLSFAFLAAILTHIGCSNQRRSPENGGRRYNRIQHGQCAYTFILPEHDGNCRESTTDQYNTNALQRDAPHVEQDFSSQKLQHLEHVMENYTQWLQKIENYIVENMKSEMAQIQQNAVQNHTATMLEIGTSLLSQTAEQTRKLTDVETQVLNQTSRLEIQLLENSLSTYKLEKQLLQQTNEILKIHEKNSLLEHKILEMEGKHKEELDTLKEEKENLQGLVTRQTYIIQELKKQLNRATTNNSVLQKQQLELMDTVHNLVNLCTKEGVLLKGGKKEEVKPFRDCADVYQAGFNKSGIYTIYINNMPEPKKVFCNMDLNGGGWTVIQHREDGSLDFQRGWKEYKMGFGNPSGEYWLGNEFIFAITSQRQYTLRTELMDWEGNRAYSQYDRFHIGNEKQNYRLYLKGHSGTAGKQSSLILHGADFSTKDADNDNCMCKCALMLTGGWWFDACGPSNLNGMFYTAGQNHGKLNGIKWHYFKGPSYSLRSTTMMIRPLDF

SEQ ID NO: 101 - protein, 498 aa, Mus musculus
MTVFLSFAFFAAILTHIGCSNQRRNPENGGRRYNRIQHGQCAYTFILPEHDGNCRESATEQYNTNALQRDAPHVEPDFSSQKLQHLEHVMENYTQWLQKLENYIVENMKSEMAQIQQNAVQNHTATMLEIGTSLLSQTAEQTRKLTDVETQVLNQTSRLEIQLLENSLSTYKLEKQLLQQTNEILKIHEKNSLLEHKILEMEGKHKEELDTLKEEKENLQGLVSRQTFIIQELEKQLSRATNNNSILQKQQLELMDTVHNLISLCTKEGVLLKGGKREEEKPFRDCADVYQAGFNKSGIYTIYFNNMPEPKKVFCNMDVNGGGWTVIQHREDGSLDFQRGWKEYKMGFGNPSGEYWLGNEFIFAITSQRQYMLRIELMDWEGNRAYSQYDRFHIGNEKQNYRLYLKGHTGTAGKQSSLILHGADFSTKDADNDNCMCKCALMLTGGWWFDACGPSNLNGMFYTAGQNHGKLNGIKWHYFKGPSYSLRSTTMMIRPLDF

SEQ ID NO: 102 - protein, 495 aa, Homo sapiens
MWQIVFFTLSCDLVLAAAYNNFRKSMDSIGKKQYQVQHGSCSYTFLLPEMDNCRSSSSPYVSNAVQRDAPLEYDDSVQRLQVLENIMENNTQWLMKLENYIQDNMKKEMVEIQQNAVQNQTAVMIEIGTNLLNQTAEQTRKLTDVEAQVLNQTTRLELQLLEHSLSTNKLEKQILDQTSEINKLQDKNSFLEKKVLAMEDKHIIQLQSIKEEKDQLQVLVSKQNSIIEELEKKIVTATVNNSVLQKQQHDLMETVNNLLTMMSTSNSKDPTVAKEEQISFRDCAEVFKSGHTTNGIYTLTFPNSTEEIKAYCDMEAGGGGWTIIQRREDGSVDFQRTWKEYKVGFGNPSGEYWLGNEFVSQLTNQQRYVLKIHLKDWEGNEAYSLYEHFYLSSEELNYRIHLKGLTGTAGKISSISQPGNDFSTKDGDNDKCICKCSQMLTGGWWFDACGPSNLNGMYYPQRQNTNKFNGIKWYYWKGSGYSLKATTMMIRPADF

SEQ ID NO: 103 - protein, 496 aa, Sus scrofa
MWQLVFFALSCDLVLAAAYNNFRKSMDSTGKRQYQVQHGPCSYTFLLPETDNCRSPSSSYVSNAVQRDAPLDYDDSVRRLQVLENIMENNTQWLMKLESYIQDNMKKEMVEIQQNAVQNQTAVMIEIGTNLLNQTAEQTRKLTDVEAQVLNQTTRLELQLLEHSLSTNKLEKQILDQTSEINKLQDKNSFLEKKVLDMEDKHIVQLQSIKEEKDQLQVLVSKQNSIIEELEKQLVTATVNNSVLQKQQHDLMETVHNLLTMISTSNSAKHSLVAKEEQIIFRDCAEAFKSGLTTSGTYTLTFPNSTEETKAYCDMETGGGGWTVIQRREDGSVDFQRTWKEYKMGFGSPSGEHWLGNEFVSQVTNQKRYVLKIHLRDWEGNEAYSLYEHFYLSSEEFNYRIHLKGLTGTAGKISSISQPGNDFSTKDADNDKCICKCSQMLTGGWWFDACGPSNLNGMYYPQRQNTNKFNGIKWYYWKGSGYSLKATTMMIRPADF

SEQ ID NO: 104 - protein, 496 aa, Mus musculus
MWQIIFLTFGWDLVLASAYSNFRKSVDSTGRRQYQVQNGPCSYTFLLPETDSCRSSSSPYMSNAVQRDAPLDYDDSVQRLQVLENILENNTQWLMKLENYIQDNMKKEMVEIQQNVVQNQTAVMIEIGTSLLNQTAAQTRKLTDVEAQVLNQTTRLELQLLQHSISTNKLEKQILDQTSEINKLQNKNSFLEQKVLDMEGKHSEQLQSMKEQKDELQVLVSKQSSVIDELEKKLVTATVNNSLLQKQQHDLMETVNSLLTMMSSPNSKSSVAIRKEEQTTFRDCAEIFKSGLTTSGIYTLTFPNSTEEIKAYCDMDVGGGGWTVIQHREDGSVDFQRTWKEYKEGFGSPLGEYWLGNEFVSQLTGQHRYVLKIQLKDWEGNEAHSLYDHFYLAGEESNYRIHLTGLTGTAGKISSISQPGSDFSTKDSDNDKCICKCSQMLSGGWWFDACGPSNLNGQYYPQKQNTNKFNGIKWYYWKGSGYSLKATTMMIRPADF

SEQ ID NO: 105 - protein, 503 aa, Homo sapiens
MLSQLAMLQGSLLLVVATMSVAQQTRQEADRGCETLVVQHGHCSYTFLLPKSEPCPPGPEVSRDSNTLQRESLANPLHLGKLPTQQVKQLEQALQNNTQWLKKLERAIKTILRSKLEQVQQQMAQNQTAPMLELGTSLLNQTTAQIRKLTDMEAQLLNQTSRMDAQMPETFLSTNKLENQLLLQRQKLQQLQGQNSALEKRLQALETKQQEELASILSKKAKLLNTLSRQSAALTNIERGLRGVRHNSSLLQDQQHSLRQLLVLLRHLVQERANASAPAFIMAGEQVFQDCAEIQRSGASASGVYTIQVSNATKPRKVFCDLQSSGGRWTLIQRRENGTVNFQRNWKDYKQGFGDPAGEHWLGNEVVHQLTRRAAYSLRVELQDWEGHEAYAQYEHFHLGSENQLYRLSVVGYSGSAGRQSSLVLQNTSFSTLDSDNDHCLCKCAQVMSGGWWFDACGLSNLNGVYYHAPDNKYKMDGIRWHYFKGPSYSLRASRMMIRPLDI

SEQ ID NO: 106 - protein, 462 aa, Sus scrofa
MYTIKLFLLIAPLVISSRIDQDSSSLDSVSPEPKSRFAMLDDVKILANGLLQLGHGLKDFVHKTKGQINDIFQKLNIFDQSFYDLSLQTNEIKEEEKELRRTTFKLQVKNEEVKNMSLDLNSKVESLLEEKILLQHKVRYLEDQLTNLIKNQPEIQEHPDITSLKTFVEQQDNSIRDLLQTVEEQYRQLNQQHSQIKEIENQLRRTGTQESTENASKPRVPRTTPSLHLNETRNVEHNDIPADCTVIYNRGDQTSGIYSIRASNSQVFNVYCDVKSGSSWTLIQHRIDGSQNFNETWENYRYGFGRLDGEFWLGLEKIYSIVKQSNYILRIELEDWNDNEYYIEYSFHLGDHETNYTLHLVEIAGNVPNALPEHEDLMFSTWDHKAKGHVNCPESYSGGWWCHDVCGENNLNGIYKKPKAKIKPERRGICWKSQNGRLYSIKSTKMLIHPIDSESSELTKAI

SEQ ID NO: 107 - protein, 509 aa, Mus musculus
MLCQPAMLLDGLLLLATMAAAQHRGPEAGGHRQIHQVRRGQCSYTFVVPEPDICQLAPTAAPEALGGSNSLQRDLPASRLHLTDWRAQRAQRAQRVSQLEKILENNTQWLLKLEQSIKVNLRSHLVQAQQDTIQNQTTTMLALGANLMNQTKAQTHKLTAVEAQVLNQTLHMKTQMLENSLSTNKLERQMLMQSRELQRLQGRNRALETRLQALEAQHQAQLNSLQEKREQLHSLLGHQTGTLANLKHNLHALSSNSSSLQQQQQQLTEFVQRLVRIVAQDQHPVSLKTPKPVFQDCAEIKRSGVNTSGVYTIYETNMTKPLKVFCDMETDGGGWTLIQHREDGSVNFQRTWEEYKEGFGNVAREHWLGNEAVHRLTSRTAYLLRVELHDWEGRQTSIQYENFQLGSERQRYSLSVNDSSSSAGRKNSLAPQGTKFSTKDMDNDNCMCKCAQMLSGGWWFDACGLSNLNGIYYSVHQHLHKINGIRWHYFRGPSYSLHGTRMMLRPMGA

SEQ ID NO: 108 - protein, 503 aa, Homo sapiens; identical to SEQ ID NO: 105

SEQ ID NO: 109 - protein, 509 aa, Mus musculus
MLCQPAMLLDGLLLLATMAAAQHRGPEAGGHRQIHQVRRGQCSYTFVVPEPDICQLAPTAAPEVLGGSNSLQRDLPASRLHLTDWRAQRAQRAQRVSQLEKILENNTQWLLKLEQSIKVNLRSHLVQAQQDTIQNQTTTMLALGANLMNQTKAQTHKLTAVEAQVLNQTLHMKTQMLENSLSTNKLERQMLMQSRELQRLQGRNRALETRLQALEAQHQAQLNSLQEKREQLHSLLGHQTGTLANLKHNLHALSSNSSSLQQQQQQLTEFVQRLVRIVAQDQHPVSLKTPKPVFQDCAEIKRSGVNTSGVYTIYETNMTKPLKVFCDMETDGGGWTLIQHREDGSVNFQRTWEEYKEGFGNVAREHWLGNEAVHRLTSRTAYLLRVELHDWEGRQTSIQYENFQLGSERQRYSLSVNDSSSSAGRKNSLAPQGTKFSTKDMDNDNCMCKCAQMLSGGWWFDACGLSNLNGIYYSVHQHLHKINGIRWHYFRGPSYSLHGTRMMLRPMGA

SEQ ID NO: 110 - protein, 466 aa, Mus musculus
MDHKEVILLFLLLLKPGQGDSLDGYISTQGASLFSLTKKQLAAGGVSDCLAKCEGETDFVCRSFQYHSKEQQCVIMAENSKTSSIIRMRDVILFEKRVYLSECKTGIGNGYRGTMSRTKSGVACQKWGATFPHVPNYSPSTHPNEGLEENYCRNPDNDEQGPWCYTTDPDKRYDYCNIPECEEECMYCSGEKYEGKISKTMSGLDCQAWDSQSPHAHGYIPAKFPSKNLKMNYCRNPDGEPRPWCFTTDPTKRWEYCDIPRCTTPPPPPSPTYQCLKGRGENYRGTVSVTVSGKTCQRWSEQTPHRHNRTPENFPCKNLEENYCRNPDGETAPWCYTTDSQLRWEYCEIPSCESSASPDQSDSSVPPEEQTPVVQECYQSDGQSYRGTSSTTITGKKCQSWAAMFPHRHSKTPENFPDAGLEMNYCRNPDGDKGPWCYTTDPSVRWEYCNLKRCSETGGSVVELPT

SEQ ID NO: 111 - protein, 812 aa, Rattus norvegicus
MDHKEIILLFLLFLKPGQGDSLDGYVSTQGASLHSLTKKQLAAGSIADCLAKCEGETDFICRSFQYHSKEQQCVIMAENSKTSSIIRMRDVILFEKRVYLSECKTGIGKGYRGTMSKTKTGVTCQKWSDTSPHVPKYSPSTHPSEGLEENYCRNPDNDEQGPWCYTTDPDQRYEYCNIPECEEECMYCSGEKYEGKISKTMSGLDCQSWDSQSPHAHGYIPAKFPSKNLKMNYCRNPDGEPRPWCFTTDPNKRWEYCDIPRCTTPPPPPGPTYQCLKGRGENYRGTVSVTASGKTCQRWSEQTPHRHNRTPENFPCKNLEENYCRNPDGETAPWCYTTDSQLRWEYCEIPSCGSSVSPDQSDSSVLPEQTPVVQECYQGNGKSYRGTSSTTNTGKKCQSWVSMTPHSHSKTPANFPDAGLEMNYCRNPDNDQRGPWCFTTDPSVRWEYCNLKRCSETGGGVAESAIVPQVPSAPGTSETDCMYGNGKEYRGKTAVTAAGTPCQEWAAQEPHSHRIFTPQTNPRAGLEKNYCRNPDGDVNGPWCYTMNPRKLYDYCNIPLCASLSSFECGKPQVEPKKCPGRVVGGCVANPHSWPWQISLRTRFSGQHFCGGTLISPEWVLTAAHCLEKSSRPEFYKVILGAHEERILGSDVQQIAVTKLVLEPNDADIALLKLSRPATITDNVIPACLPSPNYVVADRTLCYITGWGETKGTPGAGRLKEAQLPVIENKVCNRAEYLNNRVKSTELCAGHLAGGIDSCQGDSGGPLVCFEKDKYILQGVTSWGLGCARPNKPGVYVRVSRYVNWIEREMRND

SEQ ID NO: 112 - protein, 147 aa, Homo sapiens
MVMGLGVLLLVFVLGLGLTPPTLAQDNSRYTHFLTQHYDAKPQGRDDRYCESIMRRRGLTSPCKDINTFIHGNKRSIKAICENKNGNPHRENLRISKSSFQVTTCKLHGGSPWPPCQYRATAGFRNVVVACENGLPVHLDQSIFRRP

SEQ ID NO: 113 - protein, 146 aa, Macaca mulatta
MVMGLGLFLLVFMLGLGLTPPTLAQDNPRYRDFLAKHYDATPQGRNDRYCESTMRRRHLTSPCKDINTFVHGNRHHITAICGDENGSPYGGNLRISTSPFQVTTCKLRGGSPRPPCQYRATRGSRNIVVGCENGLPVHLDESIFRP

SEQ ID NO: 114 - protein, 148 aa, Bos taurus
MVMVLSPLLLVFILGLGLTPVAPAQDDYRYIHFLTQHYDAKPKGRNDEYCFNMMKNRRLTRPCKDRNTFIHGNKNDIKAICEDRNGQPYRGDLRISKSEFQITICKHKGGSSRPPCRYGATEDSRVIVVGCENGLPVHFDESFITPRH

SEQ ID NO: 115 - protein, 147 aa, Sus scrofa
MVILLGPLLLVFMLGLGLAPLSLAKDEDRYTHFLTQHYDAKPKGRDGRYCESIMKQRGLTRPCKEVNTFIHGTRNDIKAICNDKNGEPYNNFRRSKSPFQITTCKHKGGSNRPPCGYRATAGFRTIAVACENGLPVHFDESFIITSQ

SEQ ID NO: 116 - protein, 145 aa, Mus musculus
MAISPGPLFLIFVLGLVVIPPTLAQDDSRYTKFLTQHHDAKPKGRDDRYCERMMKRRSLTSPCKDVNTFIHGNKSNIKAICGANGSPYRENLRMSKSPFQVTTCKHTGGSPRPPCQYRASAGFRHVVIACENGLPVHFDESFFSL

SEQ ID NO: 117 - protein, 212 aa, Homo sapiens
MDYLLMIFSLLFVACQGAPETAVLGAELSAVGENGGEKPTPSPPWRLRRSKRCSCSSLMDKECVYFCHLDIIWVNTPEHVVPYGLGSPRSKRALENLLPTKATDRENRCQCASQKDKKCWNFCQAGKELRAEDIMEKDWNNHKKGKDCSKLGKKCIYQQLVRGRKIRRSSEEHLRQTRSETMRNSVKSSFHDPKLKGNPSRERYVTHNRAHW

SEQ ID NO: 118 - protein, 211 aa, Macaca mulatta
MDYLPMIFSLLFVAFQGAPETAVLGAELSTVGGNGGEKPTPSPPWRLRRSKRCSCSSLMDKECVYFCHLDIIWVNTPEHVVPYGLGSPRSKRALENLLPTKATDRENRCQCASQKDKKCWNFCQAGKELRAKDTMEKGWNNHKKGKDCPKLGKKCIYQQLVRGRKIGSSEEHLRQTRTETMRNSVKSSFHDPRLKAKPSREHYVTHNRAHW

SEQ ID NO: 119 - protein, 202 aa, Bos taurus
MDYFPMIFALLFVAFQGAPEAAVLGTELSAGAEDGGEKPAPATPWRPRRSKRCSCSSLMDKECVYFCHLDIIWVNTPEHVVPYGLGSPSRSKRSLKDFFPTKATVHRKRCQCASQTDKKCWNFCQAGKELRDQDSMEKAWNNQKRGKDCSKLGEKCLHQQLVAGRKTRRLEAISNSIKTSFRVAKLKAQLYRDKKVIYNRAH

SEQ ID NO: 120 - protein, 203 aa, Sus scrofa
MDYFPMIIALLFVAFQGAPETAVLGAELSPEAESQGETPSPHASWRPRRSKRCSCSSLMDKECVYFCHLDIIWVNTPEHIVPYGLGSPSRSRRSLKDLFPAKAADRRDRCQCASQKDKKCWSFCQAGKEIGRDQDTMEKRWDNQKKGTDCSKLGEKCIHRQLVMGRKIRRLEAISNSIKTSFHIAKLKAELYRDKKVTHNRTH

SEQ ID NO: 121 - protein, 202 aa, Mus musculus
MDYFPVIFSLLFVTFQGAPETAVLGAELSTGAENGVQSPPPSTPWRPRRSKRCSCSSLMDKECVYFCHLDIIWVNTPERVVPYGLGGSSRSKRSLKDLLPNKATDQAVRCQCAHQKDKKCWNFCQAGKELRAQSTMQKSLKDSKKGKPCSKLGKKCIYQQLVEGRKLRRLEAISNSIKASFRVAKLKAELYRDQKLTHNRAH

SEQ ID NO: 122 - protein, 202 aa, Rattus norvegicus
MDYFPVIFSLLFVAFQGAPETAVLGAELSPRAEKEVQSPPPSTSWRPRRSKRCSCSSLMDKECVYFCHLDIIWVNTPERVVPYGLGSPSRSKRSLKDLLPTKTTDQGNRCQCAHQKDKKCWNFCQADKELRAQSTMQKGVKDFKKGKPCPKLGKKCIYQQLVEGRKLRRLEAISNSIKTSFRVAKLKAELYRDQKLIHNRAH

SEQ ID NO: 123 - protein, 178 aa, Homo sapiens
MVSVPTTWCSVALALLVALHEGKGQAAATLEQPASSSHAQGTHLRLRRCSCSSWLDKECVYFCHLDIIWVNTPEQTAPYGLGNPPRRRRRSLPRRCQCSSARDPACATFCLRRPWTEAGAVPSRKSPADVFQTGKTGATTGELLQRLRDISTVKSLFAKRQQEAMREPRSTHSRWRKR

SEQ ID NO: 124 - protein, 178 aa, Macaca mulatta
MVSMPTTWCSVALALLVALHEGKGQAAATLEQPASSPHAQGTHLRLRRCSCSSWLDKECVYFCHLDIIWVNTPEQTAPYGLGNPPRRRRRSLPRRCQCSSARDPSCATFCLRRPWTEARAVPSRKSPADVFQTGKTGATRGELLQRLRDISTVKSLLAKRQQEAMREPRPTHSRWRKR

SEQ ID NO: 125 - protein, 177 aa, Bos taurus
MPTALCSIALALLVALHEGKSQAATTPIPEQPAPLPRARGSHLRTRRCSCSSWLDKECVYFCHLDIIWVNTPGQTAPYGLGNPPRRRRRSLPRRCECYSARDPACATFCHQRPWTDAVAVPGSGSPAAAFQDGKTQATAGELLQRLRVISATKIHFARQQQKPTRETRPTHSRQRKR

SEQ ID NO: 126 - protein, 175 aa, Mus musculus
MVSAWCSIALALLLALHEGKGQAAATLEQPASAPKGRGPHLRFRRCSCNSWLDKECVYFCHLDIIWVNTAGQTAPYGLGNPPRRRRRSLPKRCECSTAGDSACATFCHRRHWPEAVVAPSSQAPAAVLKTGKMWTAEGDLLRKLRDISATKLRFARLQPEVTRKAIPAYSRWRKR

SEQ ID NO: 127 - protein, 176 aa, Rattus norvegicus
MVSPAWCSIALALLLALHEGKGQAAATMEQPASAPKGRGPHLRFRRCSCNSWLDKECVYFCHLDIIWVNTAGQTAPYGLGNPPQRRRRSLPKRCECSSAGDSACATFCHRRPWPEAEVTSSSQGPAAVLETSKTWTAAGDLLQKLRDISAAKLQFVRLRPELTREAIPAHSRRRKR

SEQ ID NO: 128 - protein, 179 aa, Gallus gallus
MPSHPAGAALLALALCVLLEDGMGQPPLQSHLGTAAHLRTKRCSCNSWLDKECIYFCHLDIIWVNTPGHTAPYGLGSPPRRRKRSPGRCECSRSGDSTCASFCQEEPRYLQSLRLPTTSGASTKAPQSADVKPSQHSLLRALRDLAASRLQFSKQQHRAQQSAPPAVLPWKKSIWKKKR

SEQ ID NO: 129 - protein, 238 aa, Homo sapiens
MEPGLWLLFGLTVTSAAGFVPCSQSGDAGRRGVSQAPTAARSEGDCEETVAGPGEETVAGPGEGTVAPTALQGPSPGSPGQEQAAEGAPEHHRSRRCTCFTYKDKECVYYCHLDIIWINTPEQTVPYGLSNYRGSFRGKRSAGPLPGNLQLSHRPHLRCACVGRYDKACLHFCTQTLDVSSNSRTAEKTDKEEEGKVEVKDQQSKQALDLHHPKLMPGSGLALAPSTCPRCLFQEGAP

SEQ ID NO: 130 - protein, 219 aa, Homo sapiens
MEPGLWLLFGLTVTSAAGFVPCSQSGDAGRRGVSQAPTAARSEGDCEETVAGPGEETVAGPGEGTVAPTALQGPSPGSPGQEQAAEGAPEHHRSRRCTCFTYKDKECVYYCHLDIIWINTPEQTVPYGLSNYRGSFRGKRSAGPLPGNLQLSHRPHLRCACVGRYDKACLHFCTQTLDVSSNSRTAEKTDKEEEGKVRGANRGLCQRRLKSRTNKASRL

SEQ ID NO: 131 - protein, 224 aa, Homo sapiens
MEPGLWLLFGLTVTSAAGFVPCSQSGDAGRRGVSQAPTAARSEGDCEETVAGPGEETVAGPGEGTVAPTALQGPSPGSPGQEQAAEGAPEHHRSRRCTCFTYKDKECVYYCHLDIIWINTPEQTVPYGLSNYRGSFRGKRSAGPLPGNLQLSHRPHLRCACVGRYDKACLHFCTQTLDVSRQVEVKDQQSKQALDLHHPKLMPGSGLALAPSTCPRCLFQEGAP

SEQ ID NO: 132 - protein, 211 aa, Macaca mulatta
MEPGLWLLFGLTVTSAAGLVPCSQSGDAGRRGVSQVPTAARSEGDCEETVAGPGEGTVAPTALQGPSPGSPGQEQVAEGAPEHHRSRRCTCFTYKDKECVYYCHLDIIWINTPEQTVPYGLSNYRGSFRGKRSAGLLPGNLQLSHRPHSRCACVGRYDKACLHFCTQTLDVSSNSRTAEKTDKEEEGKVRGANRGLCQRRLKSRTDKASRL

SEQ ID NO: 133 - protein, 230 aa, Macaca mulatta
MEPGLWLLFGLTVTSAAGLVPCSQSGDAGRRGVSQVPTAARSEGDCEETVAGPGEGTVAPTALQGPSPGSPGQEQVAEGAPEHHRSRRCTCFTYKDKECVYYCHLDIIWINTPEQTVPYGLSNYRGSFRGKRSAGLLPGNLQLSHRPHSRCACVGRYDKACLHFCTQTLDVSSNSRTAEKTDKEEEGKVEVKDRQSKQALDLHHPKLVPSSGLALAPSTCPRCLFEEGAP

SEQ ID NO: 134 - protein, 271 aa, Bos taurus
MELGLCFLFGLAVTSAAGWVPHPQSGDAGRSSMPRAPSAATSEGDTKETVATMAARGPSPRSPWREQGPSQFGKQGAEGVPVHHRARRCTCFTYKDRECVYYCHLDIIWINTPERTAPYGLSSYRGSGSRGRRSAGQFPQSPQPVKGTLRCACTESDDDACLQFCTWSLAARGRTAPYGLSSYRGSGSRGRRSAGQFPQSPQPVKGTLRCACTESDDDACLQFCTWSLAARGNSRSAETSDKEVGKQTGGALGGVRPRSCALVATLRLLSS

SEQ ID NO: 135 - protein, 204 aa, Sus scrofa
MELRLWFLFGLTVTSAAGPVPRPQPGDAGRSGVPRAPSATKETMAMVATRGPSPRSSGQEQEPGPFGELAAKGGPVRYRARRCTCFTYKDKECVYYCHLDIIWINTPERTVPYGLSNHRGSVRGRRSAGPSPQSSQPSRGTLRCACAESQDRACVYFCTRTLAARGASRTPETPDKEAGKPAGRATGGLHPRRLKSRTDKARRL

SEQ ID NO: 136 - protein, 214 aa, Mus musculus
MEPGLWLLLGLTVTSAAGLVPCPQSGDSGRASVSQGPPEAGSERGCEETVAGPGERIVSPTVALPAQPESAGQERAPGRSGKQEDKGLPAHHRPRRCTCFTYKDKECVYYCHLDIIWINTPEQTVPYGLSNYRESLRGKRSLGPVPESSQPSPWTRLRCTCMGADDKACAHFCARTRDVTSYSGRAERPAAEEMRETGGPRQRLMSRTDKAHRP

SEQ ID NO: 137 - protein, 167 aa, Rattus norvegicus
MELGLWLLLGLTVTSAAAALPAQPGNAGQERGPGRSGDQEEKRVPAHHRPRRCTCFTYKDKECVYYCHLDIIWINTPEQTVPYGLSNHRGSLRGKRSSGPVPESSQSSPQTRLRCACSGVDDKACAYFCAHVTSYSRRAEKAAAEEKQETGGPRQRLKSRTDKVHQP

SEQ ID NO: 138 - protein, 110 aa, Gallus gallus
LRRRARRCTCYTYKDKECVYYCHLDIIWINTPERTVPYGLSNYRSSFRGKRSTGQNQSTSQPSFRCSCLDIHDKQCTQFCRRMQDRRRNHGSVKTTEKDRCREEEHTLAQ

SEQ ID NO: 139 - protein, 184 aa, Homo sapiens
MKSVLLLTTLLVPAHLVAAWSNNYAVDCPQHCDSSECKSSPRCKRTVLDDCGCCRVCAAGRGETCYRTVSGMDGMKCGPGLRCQPSNGEDPFGEEFGICKDCPYGTFGMDCRETCNCQSGICDRGTGKCLKFPFFQYSVTKSSNRFVSLTEHDMASGDGNIVREEVVKENAAGSPVMRKWLNPR

SEQ ID NO: 140 - protein, 134 aa, Homo sapiens
MKSVLLLTTLLVPAHLVAAWSNNYAVDCPQHCDSSECKSSPRCKRTVLDDCGCCRVCAAGRGETCYRTVSGMDGMKCGPGLRCQPSNGEDPFGEEFGICKEHDMASGDGNIVREEVVKENAAGSPVMRKWLNPR

SEQ ID NO: 141 - protein, 180 aa, Macaca mulatta
MTGKHAGNPVYKTHKRVGRGSATSLDGCFPPAKTMTGEPSRRQLGNMKSILLLTTLLVPAHLVAAWSNNYAVDCPQHCDSSECKSSPRCRRTVLDDCGCCRVCAAGRGETCYRTVSGMDGMKCGPGLRCQPSNGEDPFGEEFGICKEHDMTSGDGNVVREEAVKENVARSPVMRKWLNPR

SEQ ID NO: 142 - protein, 184 aa, Bos taurus
MKRLLLLATLLVPAHLAAVWSRKYAVDCPERCDSSQCKSSSRCKRTVLDDCGCCRVCAAGLGETCYRTVSGMDGVKCGPGLRCQFYNEEDDFGDEFGICKDCPFGTFGMECKQICSCQSGICNRVTGKCLKFPFFQYSVAKATNQRFVSHTEHDVASGDGNAVREELVKENDAPSPVMKWLNPR

SEQ ID NO: 143 - protein, 229 aa, Sus scrofa
MTGKHAGNPVYKTLKRVGRGSAATLDGCFPPEKTPAREAEPGAAGNMKSLLLLATLLVPAHLAAAWSTKYAVDCPERCDTNECKSSLRCKRTVLDDCGCCRVCAAGLGETCYRTVSGMDGVKCGPGLRCQFYSEEDDFGDEFGICKDCPYGTFGMECKQTCSCQSGICDRVTGKCLKFPFQYSVAKAANRRFVSHTEHDMASGDGNAVREELMKENAARSPGMKWLNPR

SEQ ID NO: 144 - protein, 184 aa, Mus musculus
MKSLLLLTTLLVPLHLGMAWSAKYAVDCPEHCDKTECRSSLRCKRTVLDDCGCCQVCAAGPGETCYRTVSGMDGVKCGPGLKCHFYSEEDDFGDEFGICKDCPYGTFGMECKETCNCQSGICDRVTGRCLDFPFFQYAAAKSPSRTSASHTERDSASGDGNAVREEIGEGNAARPSVMKWLNPR

SEQ ID NO: 145 - protein, 184 aa, Rattus norvegicus
MKSLLLLTTLLIPLHLGMAWSAKYAVDCPEHCDNTECRSSLRCKRTVLDDCGCCQVCAAGPGETCYRTVSGMDGVKCGPGLKCHFYSEEDDFGDEFGVCKDCPYGTFGMDCKETCNCQSGICDRVTGRCLDFPFFQYAAAKSPSRTSASQTERDAASGDGNAVREEIGDRNAARPSVMKWLNPR

SEQ ID NO: 146 - protein, 185 aa, Xenopus tropicalis
MKCCLLVTALLINAHLGAARKAQYAVDCPDRCDSNDCKSTTRCKRTVLDDCGCCRVCAAAAGETCYRTVSGMDGVKCGPGLRCQFFTEEDDFGDEFGICRDCPYGTYGMECRRTCNCQSGICDRVTGKCLKFPFFQLTGGKTANKQKVLPSSDQDMASGDGHNDREETLKEKNSHSSGIKWLNPR

SEQ ID NO: 147 - protein, 179 aa, Danio rerio
MRVFAILMFVLMVVFGETEAWGPGGKYAVNCPDKCNPALCGSTLRCRRTVLDDCGCCQVCAAGRGEHCYRTVSGMHGVKCGPGLFCDFYKDEDDYGDEYGICKDCMFGTYGMECRKTCDCKAGGLCDRETGACLSFKVLAKMAMLKSHSNEAGNEVGSGDTNTESSSSRASARNFLTPR

SEQ ID NO: 148 - protein, 205 aa, Homo sapiens
MEFLWAPLLGLCCSLAAADRHTVFWNSSNPKFRNEDYTIHVQLNDYVDIICPHYEDHSVADAAMEQYILYLVEHEEYQLCQPQSKDQVRWQCNRPSAKHGPEKLSEKFQRFTPFTLGKEFKEGHSYYYISKPIHQHEDRCLRLKVTVSGKITHSPQAHDNPQEKRLAADDPEVRVLHSIGHSAAPRLFPLAWTVLLLPLLLLQTP

SEQ ID NO: 149 - protein, 183 aa, Homo sapiens
MEFLWAPLLGLCCSLAAADRHTVFWNSSNPKFRNEDYTIHVQLNDYVDIICPHYEDHSVADAAMEQYILYLVEHEEYQLCQPQSKDQVRWQCNRPSAKHGPEKLSEKFQRFTPFTLGKEFKEGHSYYYISHSPQAHDNPQEKRLAADDPEVRVLHSIGHSAAPRLFPLAWTVLLLPLLLLQTP

SEQ ID NO: 150 - protein, 205 aa, Bos taurus
MEFFWASLLGLCCSLAAANRHTVFWNSSNPKFWNEDYTVHVRIDDYLDIICPHYEDNSVPDAAMEQYTLYLVEHEQYQLCQPQPKDHARWFCKSPKAKHGPEKLSEKFHRFTGFTLSKDFKEGHSYYYISKPIHHQEDRCLRLKVMIAGKITHSPQAHPNAQEKRLPADDPEVQVLHSIGHSAAPRLFPLAWAVLLLPFLLLQIP

SEQ ID NO: 151 - protein, 205 aa, Mus musculus
MEFLWAPLLGLCCSLAAADRHIVFWNSSNPKFREEDYTVHVQLNDYLDIICPHYEDDSVADAAMERYTLYMVEHQEYVACQPQSKDQVRWNCNRPSAKHGPEKLSEKFQRFTPFILGKEFKEGHSYYYISKPIYHQESQCLKLKVTVNGKITHNPQAHVNPQEKRLQADDPEVQVLHSIGYSAAPRLFPLVWAVLLLPLLLLQSQ

SEQ ID NO: 152 - protein, 213 aa, Homo sapiens
MAPAQRPLLPLLLLLLPLPPPPFARAEDAARANSDRYAVYWNRSNPRFHAGAGDDGGGYTVEVSINDYLDIYCPHYGAPLPPAERMEHYVLYMVNGEGHASCDHRQRGFKRWECNRPAAPGGPLKFSEKFQLFTPFSLGFEFRPGHEYYYISATPPNAVDRPCLRLKVYVRPTNETLYEAPEPIFTSNNSCSSPGGCRLFLSTIPVLWTLLGS

SEQ ID NO: 153 - protein, 213 aa, Bos taurus
MAPAQRPLLPLLLLLLPLPPPPFAHGEDAARANSDRYAVYWNRSNPRFHAGAADDGGGYTVEVSINDYLDIYCPHYGAPLPPAERMEHYVLYMVNGEGHASCDHRQRGFKRWECNRPAAPGGPLKFSEKFQLFTPFSLGFEFRPGHEYYYISATPPNAVDRPCLRLKVYVRPTNETLYEAPEPIFTSNNSCSGLGSCQLFLSTVPVLWTLLGS

SEQ ID NO: 154 - protein, 209 aa, Mus musculus
MAPAQRPLLPLLLLLLPLRARNEDPARANADRYAVYWNRSNPRFQVSAVGDGGGYTVEVSINDYLDIYCPHYGAPLPPAERMERYILYMVNGEGHASCDHRQRGFKRWECNRPAAPGGPLKFSEKFQLFTPFSLGFEFRPGHEYYYISATPPNLVDRPCLRLKVYVRPTNETLYEAPEPIFTSNSSCSGLGGCHLFLTTVPVLWSLLGS

SEQ ID NO: 155 - protein, 193 aa, Homo sapiens [sequence omitted]

SEQ ID NO: 156 - protein, 192 aa, Bos taurus
MGARDCTPLLMLSFLLFPLGFPVLGAPARLICDSRVLERYILEAREAENATMGCAEGCSFNENITVPDTKVNFYAWKRMEVQQQALEVWQGLALLSEAILRGQALLANASQPCEALRLHVDKAVSGLRSLTSLLRALGAQKEAISLPDATPSAAPLRAFTVDALSKLFRIYSNFLRGKLTLYTGEACRRGDR

SEQ ID NO: 157 - protein, 192 aa, Mus musculus
MGVPERPTLLLLLSLLLIPLGLPVLCAPPRLICDSRVLERYILEAKEAENVTMGCAEGPRLSENITVPDTKVNFYAWKRMEVEEQAIEVWQGLSLLSEAILQAQALLANSSQPPETLQLHIDKAISGLRSLTSLLRVLGAQKELMSPPDTTPPAPLRTLTVDTFCKLFRVYANFLRGKLKLYTGEVCRRGDR

SEQ ID NO: 158 - protein, 723 aa, Homo sapiens
MWVTKLLPALLLQHVLLHLLLLPIAIPYAEGQRKRRNTIHEFKKSAKTTLIKIDPALKIKTKKVNTADQCANRCTRNKGLPFTCKAFVFDKARKQCLWFPFNSMSSGVKKEFGHEFDLYENKDYIRNCIIGKGRSYKGTVSITKSGIKCQPWSSMIPHEHSYRGKDLQENYCRNPRGEEGGPWCFTSNPEVRYEVCDIPQCSEVECMTCNGESYRGLMDHTESGKICQRWDHQTPHRHKFLPERYPDKGFDDNYCRNPDGQPRPWCYTLDPHTRWEYCAIKTCADNTMNDTDVPLETTECIQGQGEGYRGTVNTIWNGIPCQRWDSQYPHEHDMTPENFKCKDLRENYCRNPDGSESPWCFTTDPNIRVGYCSQIPNCDMSHGQDCYRGNGKNYMGNLSQTRSGLTCSMWDKNMEDLHRHIFWEPDASKLNENYCRNPDDDAHGPWCYTGNPLIPWDYCPISRCEGDTTPTIVNLDHPVISCAKTKQLRVVNGIPTRTNIGWMVSLRYRNKHICGGSLIKESWVLTARQCFPSRDLKDYEAWLGIHDVHGRGDEKCKQVLNVSQLVYGPEGSDLVLMKLARPAVLDDFVSTIDLPNYGCTIPEKTSCSVYGWGYTGLINYDGLLRVAHLYIMGNEKCSQHHRGKVTLNESEICAGAEKIGSGPCEGDYGGPLVCEQHKMRMVLGVIVPGRGCAIPNRPGIFVRVAYYAKWIHKIILTYKVPQS

SEQ ID NO: 159 - protein, 730 aa, Bos taurus
MWVTRLLPVLLLQHVLLHLLLLPIAIPYAEGQKKRRNTLHEFKRSAKTTLIKEDPLLKIKTKKMNTADQCANRCIRNKGLPFTCKAFVFDKARKRCLWFPFNSMSSGVKKEFGHEFDLYENKDYIRNCIIGKGGSYKGTVSITKSGIKCQPWNSMIPHEHSFLPSSYRGKDLQENYCRNPRGEEGGPWCFTSNPEVRYEVCDIPQCSEVECMTCNGESYRGPMDHTETGKICQRWDHQTPHRHKFLPERYPDKGFDDNYCRNPDGKPRPWCYTLDPDTPWEYCAIKMCAHSTMNDTDLPMQTTECIQGQGEGYRGTINTIWNGIPCQRWDSQYPHQHDITPENFKCKDLRENYCRNPDGAESPWCFTTDPNIRVGYCSQIPKCDVSSGQDCYRGNGKNYMGSLSKTRSGLTCSMWDKNMEDLHRHIFWEPDATKLNKNYCRNPDDDAHGPWCYTGNPLIPWDYCPISRCEGDTTPTIVNLDHPVISCAKTKQLRVVNGIPTRTNVGWMVSLKYRNKHICGGSLIKESWILTARQCFPSRNKDLKDYEAWLGIHDVHGRGDEKRKQVLNVTQLVYGPEGSDLVLLKLARPAILDDFVSTIDLPNYGCTIPEKTTCSVYGWGYTGLINSDGLLRVAHLYIMGNEKCSQYHQGKVTLNESEICAGAENIVSGPCEGDYGGPLVCEQHKMRMVLGVIVPGRGCAIPNRPGIFVRVAYYAKWIHKIILTYKAPQL

SEQ ID NO: 160 - protein, 727 aa, Mus musculus
MWGTKLLPVLLLQHVLLHLLLLHVAIPYAEGQKKRRNTLHEFKKSAKTTLTKEDPLLKIKTKKVNSADECANRCIRNRGFTFTCKAFVFDKSRKRCYWYPFNSMSSGVKKGFGHEFDLYENKDYIRNCIIGKGGSYKGTVSITKSGIKCQPWNSMIPHEHSFLPSSYRGKDLQENYCRNPRGEEGGPWCFTSNPEVRYEVCDIPQCSEVECMTCNGESYRGPMDHTESGKTCQRWDQQTPHRHKFLPERYPDKGFDDNYCRNPDGKPRPWCYTLDPDTPWEYCAIKTCAHSAVNETDVPMETTECIQGQGEGYRGTSNTIWNGIPCQRWDSQYPHKHDITPENFKCKDLRENYCRNPDGAESPWCFTTDPNIRVGYCSQIPKCDVSSGQDCYRGNGKNYMGNLSKTRSGLTCSMWDKNMEDLHRHIFWEPDASKLNKNYCRNPDDDAHGPWCYTGNPLIPWDYCPISRCEGDTTPTIVNLDHPVISCAKTKQLRVVNGIPTQTTVGWMVSLKYRNKHICGGSLIKESWVLTARQCFPARNKDLKDYEAWLGIHDVHERGEEKHKQILNISQLVYGPEGSDLVLLKLARPAILDNFVSTIDLPSYGCTIPEKTTCSIYGWGYTGLINADGLLRVAHLYIMGNEKCSQHHQGKVTLNESELCAGAEKIGSGPCEGDYGGPLICEQHKMRMVLGVIVPGRGCAIPNRPGIFVRVAYYAKWIHKVILTYKL

SEQ ID NO: 161 - protein, 205 aa, Homo sapiens
MWVTKLLPALLLQHVLLHLLLLPIAIPYAEGQRKRRNTIHEFKKSAKTTLIKIDPALKIKTKKVNTADQCANRCTRNKGLPFTCKAFVFDKARKQCLWFPFNSMSSGVKKEFGHEFDLYENKDYIRNCIIGKGRSYKGTVSITKSGIKCQPWSSMIPHEHSYRGKDLQENYCRNPRGEEGGPWCFTSNPEVRYEVCDIPQCSEGK

SEQ ID NO: 162 - protein, 210 aa, Bos taurus
MWVTRLLPVLLLQHVLLHLLLLPIAIPYAEGQKKRRNTLHEFKRSAKTTLIKEDPLLKIKTKKMNTADQCANRCIRNKGLPFTCKAFVFDKARKRCLWFPFNSMSSGVKKEFGHEFDLYENKDYIRNCIIGKGGSYKGTVSITKSGIKCQPWNSMIPHEHSFLPSSYRGKDLQENYCRNPRGEEGGPWCFTSNPEVRYEVCDIPQCSEGK

SEQ ID NO: 163 - protein, 210 aa, Mus musculus
MWGTKLLPVLLLQHVLLHLLLLHVAIPYAEGQKKRRNTLHEFKKSAKTTLTKEDPLLKIKTKKVNSADECANRCIRNRGFTFTCKAFVFDKSRKRCYWYPFNSMSSGVKKGFGHEFDLYENKDYIRNCIIGKGGSYKGTVSITKSGIKCQPWNSMIPHEHSFLPSSYRGKDLQENYCRNPRGEEGGPWCFTSNPEVRYEVCDIPQCSEGK

SEQ ID NO: 164 - protein, 284 aa, Homo sapiens
MWVTKLLPALLLQHVLLHLLLLPIAIPYAEGQRKRRNTIHEFKKSAKTTLIKIDPALKIKTKKVNTADQCANRCTRNKGLPFTCKAFVFDKARKQCLWFPFNSMSSGVKKEFGHEFDLYENKDYIRNCIIGKGRSYKGTVSITKSGIKCQPWSSMIPHEHSYRGKDLQENYCRNPRGEEGGPWCFTSNPEVRYEVCDIPQCSEVECMTCNGESYRGLMDHTESGKICQRWDHQTPHRHKFLPERYPDKGFDDNYCRNPDGQPRPWCYTLDPHTRWEYCAIKTCA

SEQ ID NO: 165 - protein, 289 aa, Bos taurus
MWVTRLLPVLLLQHVLLHLLLLPIAIPYAEGQKKRRNTLHEFKRSAKTTLIKEDPLLKIKTKKMNTADQCANRCIRNKGLPFTCKAFVFDKARKRCLWFPFNSMSSGVKKEFGHEFDLYENKDYIRNCIIGKGGSYKGTVSITKSGIKCQPWNSMIPHEHSFLPSSYRGKDLQENYCRNPRGEEGGPWCFTSNPEVRYEVCDIPQCSEVECMTCNGESYRGPMDHTETGKICQRWDHQTPHRHKFLPERYPDKGFDDNYCRNPDGKPRPWCYTLDPDTPWEYCAIKMCA

SEQ ID NO: 166 - protein, 289 aa, Mus musculus
MWGTKLLPVLLLQHVLLHLLLLHVAIPYAEGQKKRRNTLHEFKKSAKTTLTKEDPLLKIKTKKVNSADECANRCIRNRGFTFTCKAFVFDKSRKRCYWYPFNSMSSGVKKGFGHEFDLYENKDYIRNCIIGKGGSYKGTVSITKSGIKCQPWNSMIPHEHSFLPSSYRGKDLQENYCRNPRGEEGGPWCFTSNPEVRYEVCDIPQCSEVECMTCNGESYRGPMDHTESGKTCQRWDQQTPHRHKFLPERYPDKGFDDNYCRNPDGKPRPWCYTLDPDTPWEYCAIKTCA

SEQ ID NO: 167 - protein, 379 aa, Homo sapiens
MWVTKLLPALLLQHVLLHLLLLPIAIPYAEGQRKRRNTIHEFKKSAKTTLIKIDPALKIKTKKVNTADQCANRCTRNKGLPFTCKAFVFDKARKQCLWFPFNSMSSGVKKEFGHEFDLYENKDYIRNCIIGKGRSYKGTVSITKSGIKCQPWSSMIPHEHSYRGKDLQENYCRNPRGEEGGPWCFTSNPEVRYEVCDIPQCSEVECMTCNGESYRGLMDHTESGKICQRWDHQTPHRHKFLPERYPDKGFDDNYCRNPDGQPRPWCYTLDPHTRWEYCAIKTCADNTMNDTDVPLETTECIQGQGEGYRGTVNTIWNGIPCQRWDSQYPHEHDMTPENFKCKDLRENYCRNPDGSESPWCFTTDPNIRVGYCSQIPNCD

SEQ ID NO: 168 - protein, 384 aa, Bos taurus
MWVTRLLPVLLLQHVLLHLLLLPIAIPYAEGQKKRRNTLHEFKRSAKTTLIKEDPLLKIKTKKMNTADQCANRCIRNKGLPFTCKAFVFDKARKRCLWFPFNSMSSGVKKEFGHEFDLYENKDYIRNCIIGKGGSYKGTVSITKSGIKCQPWNSMIPHEHSFLPSSYRGKDLQENYCRNPRGEEGGPWCFTSNPEVRYEVCDIPQCSEVECMTCNGESYRGPMDHTETGKICQRWDHQTPHRHKFLPERYPDKGFDDNYCRNPDGKPRPWCYTLDPDTPWEYCAIKMCAHSTMNDTDLPMQTTECIQGQGEGYRGTINTIWNGIPCQRWDSQYPHQHDITPENFKCKDLRENYCRNPDGAESPWCFTTDPNIRVGYCSQIPKCD

SEQ ID NO: 169 - protein, 384 aa, Mus musculus
MWGTKLLPVLLLQHVLLHLLLLHVAIPYAEGQKKRRNTLHEFKKSAKTTLTKEDPLLKIKTKKVNSADECANRCIRNRGFTFTCKAFVFDKSRKRCYWYPFNSMSSGVKKGFGHEFDLYENKDYIRNCIIGKGGSYKGTVSITKSGIKCQPWNSMIPHEHSFLPSSYRGKDLQENYCRNPRGEEGGPWCFTSNPEVRYEVCDIPQCSEVECMTCNGESYRGPMDHTESGKTCQRWDQQTPHRHKFLPERYPDKGFDDNYCRNPDGKPRPWCYTLDPDTPWEYCAIKTCAHSAVNETDVPMETTECIQGQGEGYRGTSNTIWNGIPCQRWDSQYPHKHDITPENFKCKDLRENYCRNPDGAESPWCFTTDPNIRVGYCSQIPKCD

SEQ ID NO: 170 - protein, 465 aa, Homo sapiens
MWVTKLLPALLLQHVLLHLLLLPIAIPYAEGQRKRRNTIHEFKKSAKTTLIKIDPALKIKTKKVNTADQCANRCTRNKGLPFTCKAFVFDKARKQCLWFPFNSMSSGVKKEFGHEFDLYENKDYIRNCIIGKGRSYKGTVSITKSGIKCQPWSSMIPHEHSYRGKDLQENYCRNPRGEEGGPWCFTSNPEVRYEVCDIPQCSEVECMTCNGESYRGLMDHTESGKICQRWDHQTPHRHKFLPERYPDKGFDDNYCRNPDGQPRPWCYTLDPHTRWEYCAIKTCADNTMNDTDVPLETTECIQGQGEGYRGTVNTIWNGIPCQRWDSQYPHEHDMTPENFKCKDLRENYCRNPDGSESPWCFTTDPNIRVGYCSQIPNCDMSHGQDCYRGNGKNYMGNLSQTRSGLTCSMWDKNMEDLHRHIFWEPDASKLNENYCRNPDDDAHGPWCYTGNPLIPWDYCPISRCE

SEQ ID NO: 171 - protein, 470 aa, Bos taurus
MWVTRLLPVLLLQHVLLHLLLLPIAIPYAEGQKKRRNTLHEFKRSAKTTLIKEDPLLKIKTKKMNTADQCANRCIRNKGLPFTCKAFVFDKARKRCLWFPFNSMSSGVKKEFGHEFDLYENKDYIRNCIIGKGGSYKGTVSITKSGIKCQPWNSMIPHEHSFLPSSYRGKDLQENYCRNPRGEEGGPWCFTSNPEVRYEVCDIPQCSEVECMTCNGESYRGPMDHTETGKICQRWDHQTPHRHKFLPERYPDKGFDDNYCRNPDGKPRPWCYTLDPDTPWEYCAIKMCAHSTMNDTDLPMQTTECIQGQGEGYRGTINTIWNGIPCQRWDSQYPHQHDITPENFKCKDLRENYCRNPDGAESPWCFTTDPNIRVGYCSQIPKCDVSSGQDCYRGNGKNYMGSLSKTRSGLTCSMWDKNMEDLHRHIFWEPDATKLNKNYCRNPDDDAHGPWCYTGNPLIPWDYCPISRCE

SEQ ID NO: 172 - protein, 470 aa, Mus musculus
MWGTKLLPVLLLQHVLLHLLLLHVAIPYAEGQKKRRNTLHEFKKSAKTTLTKEDPLLKIKTKKVNSADECANRCIRNRGFTFTCKAFVFDKSRKRCYWYPFNSMSSGVKKGFGHEFDLYENKDYIRNCIIGKGGSYKGTVSITKSGIKCQPWNSMIPHEHSFLPSSYRGKDLQENYCRNPRGEEGGPWCFTSNPEVRYEVCDIPQCSEVECMTCNGESYRGPMDHTESGKTCQRWDQQTPHRHKFLPERYPDKGFDDNYCRNPDGKPRPWCYTLDPDTPWEYCAIKTCAHSAVNETDVPMETTECIQGQGEGYRGTSNTIWNGIPCQRWDSQYPHKHDITPENFKCKDLRENYCRNPDGAESPWCFTTDPNIRVGYCSQIPKCDVSSGQDCYRGNGKNYMGNLSKTRSGLTCSMWDKNMEDLHRHIFWEPDASKLNKNYCRNPDDDAHGPWCYTGNPLIPWDYCPISRCE

SEQ ID NO: 173 - protein, 604 aa, Homo sapiens
MMRAVWEALAALAAVACLVGAVRGGPGLSMFAGQAAQPDPCSDENGHPRRCIPDFVNAAFGKDVRVSSTCGRPPARYCVVSERGEERLRSCHLCNASDPKKAHPPAFLTDLNNPHNLTCWQSENYLQFPHNVTLTLSLGKKFEVTYVSLQFCSPRPESMAIYKSMDYGRTWVPFQFYSTQCRKMYNRPHRAPITKQNEQEAVCTDSHTDMRPLSGGLIAFSTLDGRPSAHDFDNSPVLQDWVTATDIRVAFSRLHTFGDENEDDSELARDSYFYAVSDLQVGGRCKCNGHAARCVRDRDDSLVCDCRHNTAGPECDRCKPFHYDRPWQRATAREANECVACNCNLHARRCRFNMELYKLSGRKSGGVCLNCRHNTAGRHCHYCKEGYYRDMGKPITHRKACKACDCHPVGAAGKTCNQTTGQCPCKDGVTGITCNRCAKGYQQSRSPIAPCIKIPVAPPTTAASSVEEPEDCDSYCKASKGKLKINMKKYCKKDYAVQIHILKADKAGDWWKFTVNIISVYKQGTSRIRRGDQSLWIRSRDIACKCPKIKPLKKYLLLGNAEDSPDQSGIVADKSSLVIQWRDTWARRLRKFQQREKKGKCKKA

SEQ ID NO: 174 - protein, 604 aa, Macaca mulatta
MMRAVWEALAALAAVSCLVGAVRGGPGLSMFAGQAAQPDPCSDENGHPRRCIPDFVNAAFGKDVRVSSTCGRPPARYCVVSERGEERLRSCHLCNASDPKKAHPPAYLTDLNNPHNLTCWQSENYLQFPHNVTLTLSLGKKFEVTYVSLQFCSPRPESMAIYKSMDYGRTWVPFQFYSTQCRKMYNRPHRAPITKQNEQEAVCTDSHTDMRPLSGGLIAFSTLDGRPSAHDFDNSPVLQDWVTATDIRVAFSRLHTFGDENEDDSELARDSYFYAVSDLQVGGRCKCNGHAARCVRDRDDSLVCDCRHNTAGPECDRCKPFHYDRPWQRATAREANECVACNCNLHARRCRFNMELYKLSGRKSGGVCLNCRHNTAGRHCHYCKEGYYRDMGKPISHRKACKACDCHPVGAAGKTCNQTTGQCPCKDGVTGITCNRCAKGYQQSRSPIARRGDIPVAPPTTTASSVEEPEDCDSYCKASKGKLKINMKKYCKKDYAVQIHILKADKAGDWWKFTVNIISVYKQGTSRIRRGDQSLWIRSRDIACKCPKIKPLKKYLLLGNAEDSPDQSGIVADKSSLVIQWRDTWARRLRKFQQREKKGKCKKA

SEQ ID NO: 175 - protein, 603 aa, Bos taurus
MRAVWEALAALAAVACLVGAVRGGPGLSMFAGQAAQPDPCSDENGHPRRCIPDFVNAAFGKDVRVSSTCGRPPARYCVVSERGEERLRSCHLCNASDPKKAHPPAFLTDLNNPHNLTCWQSENYLQFPHNVTLTLSLGKKFEVTYVSLQFCSPRPESMAIYKSMDYGRTWVPFQFYSTQCRKMYNRPHRAPITKQNEQEAVCTDSHTDMRPLSGGLIAFSTLDGRPSAHDFDNSPVLQDWVTATDIRVAFSRLHTFGDENEDDSELARDSYFYAVSDLQVGGRCKCNGHAARCVRDRDDSLVCDCRHNTAGPECDRCKPFHYDRPWQRATAREANECVACNCNLHARRCRFNMELYKLSGRKSGGVCLNCRHNTAGRHCHYCKEGYYRDLGKPITHRKACKACDCHPVGAAGKTCNQTTGQCPCKDGVTGITCNRCAKGYQQSRSPIAPCIKIPVAPPTTAASSVEEPEDCDSYCKASKGKLKINMKKYCKKDYAVQIHILKADKAGDWWKFTVNIISVYKQGTSRIRRGDQNLWIRSRDIACKCPKIKPLKKYLLLGNAEDSPDQSGIVADKSSLVIQWRDTWARRLRKFQQREKKGKCKKA

SEQ ID NO: 176 - protein, 600 aa, Sus scrofa
MMRAMWEALAALAAVSCLVGAVRGGPGLSMFAGQAAQPDPCSDENGHPRRCIPDFVNAAFGKDVRVSSTCGRPPARYCVVSERGEERLRSCHLCNASDPKKAHPPAFLTDLNNPHNLTCWQSENYLQFPHNVTLTLSLGKKFEVTYVSLQFCSPRPESMAIYKSMDYGRTWVPFQFYSTQCRKMYNRPHRAPITKQNEQEAVCTDSHTDMRPLSGGLIAFSTLDGRPSAHDFDNSPVLQDWVTATDIRVAFSRLHTFGDENEDDSELARDSYFYAVSDLQVGGRCKCNGHAARCVRDRDDSLVCDCRHNTAGPECDRCKPFHYDRPWQRATAREANECVACNCNLHARRCRFNMELYKLSGRKSGGVCLNCRHNTAGRHCHYCKEGYFRDLGKPITHRKACKACDCHPVGAAGKTCNQTTGQCPCKDGVTGVTCNRCAKGYQQSRSPIAPCIKIPVAPPTTAASSVEEPEDCDSYCKASKGKLKINMKKYCKKDYAVQIHILKADKAGDWWKFTVNIISVYKQGASRIRRGDQNLWIRSRDIACKCPKIKPLKKYLLLGNAEDSPDQSGIVADKSSLVIQWRDTWARRLRKFQQREKKEL

SEQ ID NO: 177 - protein, 604 aa, Mus musculus
MMRAVWEALAALAAVACLVGAVRGGPGLSMFAGQAAQPDPCSDENGHPRRCIPDFVNAAFGKDVRVSSTCGRPPARYCVVSERGEERLRSCHLCNSSDPKKAHPPAFLTDLNNPHNLTCWQSENYLQFPHNVTLTLSLGKKFEVTYVSLQFCSPRPESMAIYKSMDYGRTWVPFQFYSTQCRKMYNRPHRAPITKQNEQEAVCTDSHTDMRPLSGGLIAFSTLDGRPSAHDFDNSPVLQDWVTATDIRVAFSRLHTFGDENEDDSELARDSYYYAVSDLQVGGRCKCNGHAARCVRDRDDSLVCDCRHNTAGPECDRCKPFHYDRPWQRATAREANECVACNCNLHARRCRFNMELYKLSGRKSGGVCLNCRHNTAGRHCHYCKEGFYRDMGKPITHRKACKACDCHPVGAAGKTCNQTTGQCPCKDGVTGITCNRCAKGYQQSRSPIAPCIKIPVAPPTTAASSVEEPEDCDSYCKASKGKLKMNMKKYCRKDYAVQIHILKADKAGDWWKFTVNIISVYKQGTSRIRRGDQSLWIRSRDIACKCPKIKPLKKYLLLGNAEDSPDQSGIVADKSSLVIQWRDTWARRLRKFQQREKKGKCKKA

SEQ ID NO: 178 - protein, 604 aa, Rattus norvegicus
  VARIANT 544, 576, 589: Xaa can be any amino acid
MMRAVWEALAALAAVACLVGAVRGGPGLSMFAGQAAQPDPCSDENGHPRRCIPDFVNAAFGKDVRVSSTCGRPPARYCVVSERGEERLRSCHLCNSSDPKKAHPPAFLTDLNNPHNLTCWQSENYLQFPHNVTLTLSLGKKFEVTYVSLQFCSPRPESMAIYKSMDYGRTWVPFQFYSTQCRKMYNRPHRAPITKQNEQEAVCTDSHTDMRPLSGGLIAFSTLDGRPSAHDFDNSPVLQDWVTATDIRVAFSRLHTFGDENEDDSELARDSYYYAVSDLQVGGRCKCNGHAARCVRDRDDSLVCDCRHNTAGPECDRCKPFHYDRPWQRATAREANECVACNCNLHARRCRFNMELYKLSGRKSGGVCLNCRHNTAGRHCHYCKEGFYRDMGKPITHRKACKACDCHPVGAAGKTCNQTTGQCPCKDGVTGITCNRCAKGYQQSRSPIAPCIKIPVAPPTTAASSMEEPEDCDSYCKASKGKLKMNMKKYCRKDYAVQIHILKADKAGDWWKFTVNIISVYKQGTSRIRRGDQSLWIRSRDIAXKCPKIKPLKKYLLLGNAEDSPDQSGIVADKSXLVIQWRDTWARRXRKFQQREKKGKCKKA

SEQ ID NO: 179 - protein, 606 aa, Gallus gallus
MPRRGAEGPLALLLAAAWLAQPLRGGYPGLNMFAVQTAQPDPCYDEHGLPRRCIPDFVNSAFGKEVKVSSTCGKPPSRYCVVTEKGEEQVRSCHLCNASDPKRAHPPSFLTDLNNPHNLTCWQSDSYVQYPHNVTLTLSLGKKFEVTYVSLQFCSPRPESMAIYKSMDYGKTWVPFQFYSTQCRKMYNKPSRAAITKQNEQEAICTDSHTDVRPLSGGLIAFSTLDGRPTAHDFDNSPVLQDWVTATDIKVTFSRLHTFGDENEDDSELARDSYFYAVSDLQVGGRCKCNGHASRCVRDRDDNLVCDCKHNTAGPECDRCKPFHYDRPWQRATAREANECVACNCNLHARRCRFNMELYKLSGRKSGGVCLNCRHNTAGRHCHYCKEGFYRDLSKPISHRKACKECDCHPVGAAGQTCNQTTGQCPCKDGVTGITCNRCAKGYQQSRSPIAPCIKIPAAPPPTAASSTEEPADCDSYCKASKGKLKINMKKYCKKDYAVQIHILKAEKNADWWKFTVNIISVYKQGSNRLRRGDQTLWVHAKDIACKCPKVKPMKKYLLLGSTEDSPDQSGIIADKSSLVIQWRDTWARRLRKFQQREKKGKCRKA

SEQ ID NO: 180 - protein, 580 aa, Mus musculus
MPTWLWGLLLTAGTLSAALSPGLPASADPCYDEAREPRSCIPGLVNAALGREVLASSTCGRSANRVCDSSDPQRAHSADLLTSAPGTASPLCWRSDLLQQAPFNVTLTVPLGKAFELVFVSLRFCSAPPTSVALLKSQDHGRSWVPLGFFSSSCTLDYGRLPAPADGPSGPGPEALCFPAPQAQPDGGGLLAFSVQDGSPQGLDLDNSPVLQDWVTATDIRIVLTRPAIQGDTRDGGVTVPYSYSATELQVGGRCKCNGHASRCLLDTHGHLVCDCQHGTEGPDCSRCKPFYCDRPWQRATGQEAHACLACSCNGHARRCRFNMELYRLSGRRSGGVCLNCRHNTAGRHCHYCREGFYRDPGRVLSDRRACRACDCHPVGAAGKTCNQTTGQCPCKDGVTGLTCNRCAPGFQQSRSPVAPCVKTPVPGPTEESSPVEPQDCESHCRPARGSYRISLKKFCRKDYAVQVAVGARGEARGSWTRFPVAVLAVFRSGEERARRGSSALWVPTLDAACGCPRLLPGRRYLLLGGGPGAAAGSTAGRGQGLSAARGSLVLPWRDAWTRRLRRLQRRERRGRCGTA

SEQ ID NO: 181 - protein, 581 aa, Gallus gallus
LRLLLTTSVLRLARAANPFVAQQTPPDPCYDESGAPRRCIPEFVNAAFGKEVQASSTCGKPPTRHCDASDPRRAHPPAYLTDLNTAANMTCWRSETLHHLPHNVTLTLSLGKKFEVVYVSLQFCSPRPESTAIFKSMDYGKTWVPYQYYSSQCRKIYGKPSKATVTKQNEQEALCTDGLTDLYPLTGGLIAFSTLDGRPSAQDFDSSPVLQDWVTATDIRVVFSRPHLFRELGGREAGEEDGGAGATPYYYSVGELQVGGRCKCNGHASRCVKDKEQKLVCDCKHNTEGPECDRCKPFHYDRPWQRASAREANECLACNCNLHARRCRFNMELYKLSGRKSGGVCLNCRHNTAGRHCHYCKEGFYRDLSKSITDRKACKACDCHPVGAAGKTCNQTTGQCPCKDGVTGLTCNRCAKGFQQSRSPVAPCIKIPAINPTSLVTSTEAPADCDSYCKPAKGNYKINMKKYCKKDYVVQVNILEMETVANWAKFTINILSVYKCRDERVKRGDNFLWIHLKDLSCKCPKIQISKKYLVMGISENSTDRPGLMADKNSLVIQWRDAWTRRLRKLQRREKKGKCVKP

SEQ ID NO: 182 - protein, 580 aa, Homo sapiens
MPGWPWGLLLTAGTLFAALSPGPPAPADPCHDEGGAPRGCVPGLVNAALGREVLASSTCGRPATRACDASDPRRAHSPALLTSPGGTASPLCWRSESLPRAPLNVTLTVPLGKAFELVFVSLRFCSAPPASVALLKSQDHGRSWAPLGFFSSHCDLDYGRLPAPANGPAGPGPEALCFPAPLAQPDGSGLLAFSMQDSSPPGLDLDSSPVLQDWVTATDVRVVLTRPSTAGDPRDMEAVVPYSYAATDLQVGGRCKCNGHASRCLLDTQGHLICDCRHGTEGPDCGRCKPFYCDRPWQRATARESHACLACSCNGHARRCRFNMELYRLSGRRSGGVCLNCRHNTAGRHCHYCREGFYRDPGRALSDRRACRACDCHPVGAAGKTCNQTTGQCPCKDGVTGLTCNRCAPGFQQSRSPVAPCVKTPIPGPTEDSSPVQPQDCDSHCKPARGSYRISLKKFCKKDYAVQVAVGARGEARGAWTRFPVAVLAVFRSGEERARRGSSALWVPAGDAACGCPRLLPGRRYLLLGGGPGAAAGGAGGRGPGLIAARGSLVLPWRDAWTRRLRRLQRRERRGRCSAA

SEQ ID NO: 183 - protein, 580 aa, Bos taurus
MPGWPWGLLLTAGTLSAALSPGPLAPADPCHDDGGAPRGCVPGLVNAALGREVLASSTCGRPATRACDASDPRRAHPAALLTSAGGTASPVCWRSDSLTQVPHNVTLTVPLGKAFELVFVSLRFCSAPPTSLALLKSQDHGRSWTPLGFFSSHCGLDYGRLPAPADGPAGPGPEALCFPAPQAQPDGGGLLAFSVQDGSPPGLDLDSSPVLQDWVTATDIQVVLTRPAVLGDTRGAMATAPYSYSATELQVGGRCKCNGHASRCLLDPQGHLTCDCRHGTEGPDCSRCKPFYCDRPWQRATAREAHACLACSCNGHARRCRFNMELYRLSGRRSGGVCLNCRHNTAGRHCHYCREGFYRDPGRALSDRRACRACDCHPVGAAGKTCNQTTGQCPCKDGVTGLTCNRCAPGFQQSRSPVAPCVKTPVPGPTEESSPVAPQDCDLHCKPARGSYRISLKKFCRKDYAVQVAVGARGEARGSWTRFPVAVLAVFRSGEERARRGSSALWVPARDAACGCPRLLPGRRYLLLGGGPGAAVGGPGGRGPGLSAARGSLVLPWRDAWTRRLRRLQRRERRGRCGAA

SEQ ID NO: 184 - protein, 580 aa, Mus musculus; identical to SEQ ID NO: 180

SEQ ID NO: 185 - protein, 580 aa, Rattus norvegicus
MPTWPWGLLLTAGTLSAALSPGLPASADPCYDEAREPRCCTPGLVNAALGREVLASSTCGRPANHVCDPSDPQRAHSADLLTSAPGTASPLCWRSDVLQRAPFNVTLTVPLGKAFELVFVSLRFCSAPPTSVALLKSQDHGRSWVPLGFFSSSCSLDYGRLPAPADGPAGPGPEALCFPAPQAQPDGGGLLAFSVQDGSPQGLDLDNSPVLQDWVTATDIRIVLTRPAIQGDTRDGGVTVPYSYSATELQVGGRCKCNGHSSRCLMDTHGHLVCDCQHGTEGPDCSRCKPFYCDRPWQRATGQEAHACLACSCNGHARRCRFNMELYRLSGRRSGGVCLNCRHNTAGRHCHYCREGFYRDPGRVLSDRRACRACDCHPVGAAGKTCNQTTGQCPCKDGVTGLTCNRCAPGFQQSRSPVAPCVKTPVPGPTEESSPVEPQDCESHCRPARGSYRISLKKFCRKDYAVQVAVGARGEARGAWTRFPVAVLAVFRSGEERARRGSSALWVPTLDAACGCPRLQPGRRYLLLGDGPGAAAGSPAGRGPGLSAARGSLVLPWRDAWTRRLRRLQRRERRGRCGTA

SEQ ID NO: 186 - protein, 628 aa, Homo sapiens
MGSCARLLLLWGCTVVAAGLSGVAGVSSRCEKACNPRMGNLALGRKLWADTTCGQNATELYCFYSENTDLTCRQPKCDKCNAAYPHLAHLPSAMADSSFRFPRTWWQSAEDVHREKIQLDLEAEFYFTHLIVMFKSPRPAAMVLDRSQDFGKTWKPYKYFATNCSATFGLEDDVVKKGAICTSKYSSPFPCTGGEVIFKALSPPYDTENPYSAKVQEQLKITNLRVQLLKRQSCPCQRNDLNEEPQHFTHYAIYDFIVKGSCFCNGHADQCIPVHGFRPVKAPGTFHMVHGKCMCKHNTAGSHCQHCAPLYNDRPWEAADGKTGAPNECRTCKCNGHADTCHFDVNVWEASGNRSGGVCDDCQHNTEGQYCQRCKPGFYRDLRRPFSAPDACKPCSCHPVGSAVLPANSVTFCDPSNGDCPCKPGVAGRRCDRCMVGYWGFGDYGCRPCDCAGSCDPITGDCISSHTDIDWYHEVPDFRPVHNKSEPAWEWEDAQGFSALLHSGKCECKEQTLGNAKAFCGMKYSYVLKIKILSAHDKGTHVEVNVKIKKVLKSTKLKIFRGKRTLYPESWTDRGCTCPILNPGLEYLVAGHEDIRTGKLIVNMKSFVQHWKPSLGRKVMDILKRECK

SEQ ID NO: 187 - protein, 627 aa, Bos taurus
MGSCARLLLLWGCSAVAAGLSGVAGVSSRCEKACNPRMGNLALGRKLWTDTTCGQNATELYCFYSENTDLTCQQPKCDKCNAAQPHLAHLPAAMADSSFRYPRTWWQSAEDVHREKIQLDLEAEFYFTHLIMVFKSPRPAAMVLDRSQDFGKTWKPYKYFATNCSATFGLEDDVVKKGAICTSRYSNPFPCTGGEVIFRALSPPNDMENPYGAKVQEQLKITNLRVQLLKRQSCPCQRNHLNAEPQHFTHYAIYDFIVKGSCFCNGHADQCIPIDGFRPVKAPGAFHVVHGKCICKHNTAGTHCQHCAPLYNDRPWEAADGKTGSPNECRTCKCNGHADACHFDINVWEASGNRSGGVCNDCQHNTEGQHCQRCKPGFYWDLRRPFSAPDACKSCSCHPVGSAVLPFSSVTFCDPSNGDCPCKPGVAGPHCERCMVGYWGFGDYGCRPCDCAGSCDPHTGDCLSSTDIDWYHEVPDFHSMHNKSEPTWDWKDEQGFSALRHSGKCECKEQVLGNSKAFCGMKYSYVLKIKILSAHDKGSHAEVNVKIKKVLKSTKLKILRGKRTLYPESWTNRGCTCPILNPGLEYLVAGHEDVRTGKLVVNMKSFVQHWKPSLGRKVMDILRRECK

SEQ ID NO: 188 - protein, 637 aa, Sus scrofa
MEKDGTETRQQEEVWLPDCKHSPVKQTGLNGVAGGSSRCEKACNPQMGNLALGRKLWADTTCGQNATELYCFYSENTDLTCQQPKCDKCNAAQPHLAHLPAAMADSSFRFPRTWWQSAEDVHREKIQLDLEAEFYFTHLIMVFKSPRPAAMVLDRSQDFGKTWMPYKYFATNCSATFGLEDDVVKKGAICTSRYSNPFPCTGGEVIFRALSPPYDVEDPYSAKAQEQLKITNLRVQLLKRQSCPCQRNDPNAKPQHFTHYAIYDFIVKGSCFCNGHADQCVPVDGFKPVKAPGAFHVVHGKCMCKHNTAGTHCQHCAPLYNDRPWEAADGKTGSPKECRTCKCNGHADACHFDINVWEASGNRSGGVCNDCQHNTEGQHCQRCKPGFYRDLRRPFSAPDACKLCSCHPVGSAVLPFSSVTFCDPSNGDCPCKPGVAGPHCDRCMVGYWGFGEYGCRPCDCAGSCDPLTGDCTSSNTDIDWYHDIPDFHSMHNKSEPKWEWEDEQGFSALRHSGKCECKEQVLGNSKAFCRMKYSYVLKIKILSAHDKGSHAEVNVKIKKVLKSTKLKILRGKRTLYPESWTNRGCTCPILNPGLEYLVAGHEDVRTGKLVVNMKSFVQHWKPSLGRKVMDILKRECK

SEQ ID NO: 189 - protein, 628 aa, Mus musculus
MGSCARLLLLWGCSAVAAGLNGVAGANSRCEKACNPRMGNLALGRKLRADTMCGQNATELFCFYSENADLTCRQPKCDKCNAAHSHLAHPPSAMADSSFRFPRTWWQSAEDVHREKIQLDLEAEFYFTHLIMVFKSPRPAAMVLDRSQDFGKTWKPYKYFATNCSATFGLEDDVVKKGAICTSRYSNPFPCTGGEVIFRALSPPYDIENPYSAKVQEQLKITNLRVRLLKRQSCPCQINDLNAKPHHFMHYAVYDFIVKGSCFCNGHADQCLPVEGFRPIKAPGAFHVVHGRCMCKHNTAGSHCQHCAPLYNDRPWEAADGRTGAPNECRTCKCNGHADTCHFDVNVWEASGNRSGGVCNNCQHNTEGQHCQRCKPGFYRDLRRPFSAPDACKACSCHPVGSAILPFSSVTFCDPSNGDCPCKPGVAGPHCDRCMVGYWGFGDYGCRPCDCAGSCDPLTGDCISSNADVDWYHEVPAFHSMHNKSEPSWEWEDEQGFSALRHSGKCECKEQVLGNPKAFCGMKYSYVLKIKILSAHDKGSHAEVNVKIKKVLKSTKLKILRGKRTLYPESWTNRGCTCPILNPGLEYLVAGHEDVRTGKLIVNMKSFVQHWKPALGRRVMHILKRDCV

SEQ ID NO: 190 - protein, 630 aa, Rattus norvegicus
MGSCARLLLLWGCSAVAAGFNGVSGVNSRCEKACNPRMGNLALGRKLQADTTCGQNATELFCFYSENADLTCRQPKCDKCNGAHSHLAHPPSAMADSSFRFPRTWWQSAEDVHREKIQLDLEAEFYFTHLIMVFKSPRPAAMVLDRSQDFGKTWKPYKYFATNCSATFGLEDDVVKKGAICTSRYSNPFPCTGGEVIFRALSPPYDIENPYSAKVQEQLKITNLRVRLLKRQSCPCQRNDLNAKPHHFTHYAIYDFIVKGSCFCNGHADQCLPVEGFRPVKAPGAFHVVHGKCMCKHNTAGSHCQHCAPLYNDRPWEAADGRTGAPNECRTCKCNGHADTCHFDINVWEASGNRSGGVCNNCQHNTEGQHCQRCKPGFYRDLRRPFSAPDACKACSCHPVGSAILPFSSVTFCDPSNGDCPCKPGVAGPHCDRCMVGYWGFGDYGCRPCDCAGSCDPLTGDCISSNADVDWYHEVPAFHSLHNKSEPGWEWEDEQGFSALRHSGKCECKEQVLGNPKAFCGMKYSYVLKIKILSAHDKGSHAEVNVKIKKVLQATKLKILRGKRTLYPESWTNRGCTCPILNPGLEYLVAGYEDVRTGRLIVNMKSFVQPWKPALGRRVMHILKRECVEH

SEQ ID NO: 191 - protein, 778 aa, Gallus gallus
MCCSERGCSDGQIPQGGQEKPLSQGCGVENPSALICPFTEFLGRAAAHRKAVTFHNTRCSVAVMQLQTRGKTNALHRVSSSPCWGLRAAAFLPQPPAEPKSLALKLQVRKGPRVLGLQVAGTWAGACWELNPVRSLNGNLGASPLGSAVPHHQESLPPIRASPHLSKSSHCLGSVAGAGSPCEKACNPRLGNLAHGRTLRTETACGSHAAEPFCAYAEDATLRCKPPTCGHCSGAHAGLAHPPAAMADSPFRLPRTWWQAAGDAPQETIQLDLEATFYFTHLILVFKSPRPAAMVLERSQDFGKTWQAYKYFATNCSATFGLEDDVVRRGAPCTSRYSSPFPCTGGEVIYRALSPPHAAKDPYSTEAQAQLKVTNLRVRLLERQSCPCHPLEPPALPAPYYAVYDFIVKGSCFCNGHADHCVPVRGFRPVRAAGAFHVVHGKCMCKHNTAGPHCQHCAPLYNDRPWQAADGKTGAPRECQSCKCNGHADTCHFDMDAWLASGNRSGGVCDNCQHNTEGQHCQRCKPGFYRDLRKPFSAPDACKPCSCHPLGSAALPLGPRTFCDPSTGDCPCKPGVAGPRCDRCLPGYWGFGTSGCRPCDCARSCHPLTGDCHSSSVDASWQQEVLPFQPTLNESKPAWGWEDEQGFSALRHSGKCECKEQVLGNSKVFCGMKYTYVIKTKILSAHDKGSHAEVNVKIKKVLKSTKLKILRGKRTLYPESWTNRGCTCPILNPGLEYLVAGHEDVRTGRLIVNMKSFVHQWKSALGRKVLEILKRDCN

SEQ ID NO: 192 - protein, 489 aa, Homo sapiens
MPVTFALLLLLGQATADPCYDPQGRPQFCLPPVTQLAAVAASCPQACALSPGNHLGARETCNGSLTLALGGPFLLTSVSLRFCTPGPPALILSAAWASGGPWRLLWHRPAWPGALGGPERVTFHSTPGPKATVAASHLRVEFGGQAGLAAAGLRGRCQCHGHAARCAARARPPRCHCRHHTTGPGCESCRPSHRDWPWRPATPRHPHPCLPCSCNQHARRCRFNSELFRLSGGRSGGVCERCRHHTAGRHCHYCQPGFWRDPSQPIFSRRACRACQCHPIGATGGTCNQTSGQCTCKLGVTGLTCNRCGPGYQQSRSPRMPCQRIPEATTTLATTPGAYSSDPQCQNYCNMSDTRVHMSLRRYCQQDHVLRAQVLASEAAGPAWQRLAVRVLAVYKQRAQPVRRGDQDAWVPRADLTCGCLRLQPGTDYLLLGSAVGDPDPTRLILDRHGLALPWRPRWARPLKRLQQEERAGGCRGVRAPTPSPRPEH

SEQ ID NO: 193 - protein, 489 aa, Bos taurus
MPVTFALWLLLSQASADPCYHPGGRPRFCLPPVTQLAGMAASCPQACGPSPGVDLGPRAPCNGSLTLGLGGPFLLSSVSLRFCTPGPPALVLSAAWATGGPWRSLWRRPAWPGVLGGPERVIFRVPAGPKASVVASHLRLELGGRGGLAAAGVRGRCQCHGHAARCAARDRPPRCRCRHHTTGPGCESCQPSHRDWPWRPATPRHPHPCLPCSCNQHARRCRFNSELFRLSGGRSGGVCERCRHHTAGRHCHYCQPGFWRDPGQPISSRKACRACQCHPIGATGGACNQTNGQCSCKLGVTGLTCNRCGPGYQQSRSPRMPCQRILEATTTLATTPHAYSSDPQCQNYCNTSDTRIHMSLQRYCQQDYVLHAQVLASEAADTTWQRLAVRVLAVYKQGAQPVRRGSQAAWVPRADLTCGCLRLRPASHYLLLGRTAGGPDPTRLVLDRHGLALPWRPRWARPLRRLQQEERAGGCRTLRPSTLSPEPRL

SEQ ID NO: 194 - protein, 452 aa, Mus musculus
MTDYRTLFSSPGAGSTVTTPITLSLLLLLSQATSDPCYDPGGRPRFCLPPVTQLVGKAAAPCSQTCALPAASPGPACNSSLTLDLDGSFLLTSVTLRFCTAGPPALVLSAAWATGGPWRPLWRRPAWPGALGGPKKVTFHSPPGPKTRIVASYLRVEFGGKAGLVTTGVRGRCQCHGHAARCATRAQPPRCRCRHHTTGPGCESCRPSHRDWPWRPATPQHPHPCLPCQCHPIGATGGMCNQTSGQCSCKLGVTGLTCNRCGPGYQQSRSPRMPCQRIPEATTTPATTPVASRSDPQCQGYCNVSVSSVHMSLQRYCQQDYVLHAQVSASSSQPSEAVGPEWWRLAVHVLAVFKQRAWPVRRGGQEAWVPRADLICGCLRLRPGADYLLLGRAAQTHDDDNYDPARLILNRHGLALPWRPRWARPLRRLQQKERGGACRGLLPPTRSPGPRN

SEQ ID NO: 195 - protein, 456 aa, Rattus norvegicus
MADYRTLFSPSGTGSAVTVLVALSLLLLLSQATSDPCYDPGGRPRFCLPPVTQLVGKAAAPCSQTCALPADSPDPVCNGTLTLDLDGSFLLTSVTLRFCTAGPPALVLSAAWAIGGPWRPLWRRPAWPGVLGGPKKVTFHSPPGPKTRIVASYLRVELGGKAGLVTTGVRGRCQCHGHAARCAARAQPPRCRCRHHTTGPGCESCRPSHRDWPWRPATPQHPHPCLPCQCHPIGATGGMCNQTSGQCSCKLGVTGLTCNHCGPGYQQSRSPRMPCQRIPEATTALATTPVASRSDPQCQGYCNVSVSSVHMNLQKYCQQDYVLHARVAESAQVSASSSLSSLSEAVGPEWWRLAVHVLAVFKQRAWPVRRGSQEAWVPRADLSCGCLRLRPGADYLLLGRAAENHTDPAHLILNRHSLALPWRPRWAGPLRRLQQKERGGACRGLLPPTRSPGPRN

SEQ ID NO: 196 - protein, 539 aa, Homo sapiens
MYLSRFLSIHALWVTVSSVMQPYPLVWGHYDLCKTQIYTEEGKVWDYMACQPESTDMTKYLKVKLDPPDITCGDPPETFCAMGNPYMCNNECDASTPELAHPPELMFDFEGRHPSTFWQSATWKEYPKPLQVNITLSWSKTIELTDNIVITFESGRPDQMILEKSLDYGRTWQPYQYYATDCLDAFHMDPKSVKDLSQHTVLEIICTEEYSTGYTTNSKIIHFEIKDRFAFFAGPRLRNMASLYGQLDTTKKLRDFFTVTDLRIRLLRPAVGEIFVDELHLARYFYAISDIKVRGRCKCNLHATVCVYDNSKLTCECEHNTTGPDCGKCKKNYQGRPWSPGSYLPIPKGTANTCIPSISSIGNCECFGHSNRCSYIDLLNTVICVSCKHNTRGQHCELCRLGYFRNASAQLDDENVCIECYCNPLGSIHDRCNGSGFCECKTGTTGPKCDECLPGNSWHYGCQPNVCDNELLHCQNGGTCHNNVRCLCPAAYTGILCEKLRCEEAGSCGSDSGQGAPPHGSPALLLLTTLLGTASPLVF

SEQ ID NO: 197 - protein, 480 aa, Homo sapiens
MYLSRFLSIHALWVTVSSVMQPYPLVWGHYDLCKTQIYTEEGKVWDYMACQPESTDMTKYLKVKLDPPDITCGDPPETFCAMGNPYMCNNECDASTPELAHPPELMFDFEGRHPSTFWQSATWKEYPKPLQVNITLSWSKTIELTDNIVITFESGRPDQMILEKSLDYGRTWQPYQYYATDCLDAFHMDPKSVKDLSQHTVLEIICTEEYSTGYTTNSKIIHFEIKDRFAFFAGPRLRNMASLYGQLDTTKKLRDFFTVTDLRIRLLRPAVGEIFVDELHLARYFYAISDIKVRGRCKCNLHATVCVYDNSKLTCECEHNTTGPDCGKCKKNYQGRPWSPGSYLPIPKGTANTCIPSISSIGNPPKFNRIWPNISSLEVSNPKQVAPKLALSTVSSVQVANHKRANVCDNELLHCQNGGTCHNNVRCLCPAAYTGILCEKLRCEEAGSCGSDSGQGAPPHGSPALLLLTTLLGTASPLVF

SEQ ID NO: 198 - protein, 438 aa, Homo sapiens
MYLSRFLSIHALWVTVSSVMQPYPLVWGHYDLCKTQIYTEEGKVWDYMACQPESTDMTKYLKVKLDPPDITCGDPPETFCAMGNPYMCNNECDASTPELAHPPELMFDFEGRHPSTFWQSATWKEYPKPLQVNITLSWSKTIELTDNIVITFESGRPDQMILEKSLDYGRTWQPYQYYATDCLDAFHMDPKSVKDLSQHTVLEIICTEEYSTGYTTNSKIIHFEIKDRFAFFAGPRLRNMASLYGQLDTTKKLRDFFTVTDLRIRLLRPAVGEIFVDELHLARYFYAISDIKVRGRCKCNLHATVCVYDNSKLTCECEHNTTGPDCGKCKKNYQGRPWSPGSYLPIPKGTANTCIPSISSIGTNVCDNELLHCQNGGTCHNNVRCLCPAAYTGILCEKLRCEEAGSCGSDSGQGAPPHGSPALLLLTTLLGTASPLVF

SEQ ID NO: 199 - protein, 167 aa, Homo sapiens
PIPKGTANTCIPSISSIGNCECFGHSNRCSYIDLLNTVICVSCKHNTRGQHCELCRLGYFRNASAQLDDENVCIECYCNPLGSIHDRCNGSGFCECKTGTTGPKCDECLPGNSWHYGCQPNVCDNELLHCQNGGTCHNNVRCLCPAAYTGILCEKLRCEEAGSCGSD

SEQ ID NO: 200 - protein, 111 aa, Homo sapiens
PIPKGTANTCIPSISSIGKCYCNPLGSIHDRCNGSGFCECKTGTTGPKCDECLPGNSWHYGCQPNVCDNELLHCQNGGTCHNNVRCLCPAAYTGILCEKLRCEEAGSCGSD

SEQ ID NO: 201 - protein, 66 aa, Homo sapiens
PIPKGTANTCIPSISSIGTNVCDNELLHCQNGGTCHNNVRCLCPAAYTGILCEKLRCEEAGSCGSD

SEQ ID NO: 202 - protein, 108 aa, Homo sapiens
PIPKGTANTCIPSISSIGNPPKFNRIWPNISSLEVSNPKQVAPKLALSTVSSVQVANHKRANVCDNELLHCQNGGTCHNNVRCLCPAAYTGILCEKLRCEEAGSCGSD

SEQ ID NO: 203 - protein, 88 aa, Homo sapiens
PIPKGTANTCIPSISSIGNPPKFNRIWPNISSLEVSNPKQANVCDNELLHCQNGGTCHNNVRCLCPAAYTGILCEKLRCEEAGSCGSD

SEQ ID NO: 204 - protein, 57 aa, Homo sapiens
PIPKGTANTSNVCDNELLHCQNGGTCHNNVRCLCPAAYTGILCEKLRCEEAGSCGSD

SEQ ID NO: 205 - protein, 209 aa, Homo sapiens
PIPKGTANTCIPSISSIGNPPKFNRIWPNISSLEVSNPKQVAPKLALSTVSSVQVANHKRDCECFGHSNRCSYIDLLNTVICVSCKHNTRGQHCELCRLGYFRNASAQLDDENVCIECYCNPLGSIHDRCNGSGFCECKTGTTGPKCDECLPGNSWHYGCQPNVCDNELLHCQNGGTCHNNVRCLCPAAYTGILCEKLRCEEAGSCGSD

SEQ ID NO: 206 - protein, 133 aa, Homo sapiens
PIPKGTANTCIPSISSIGNPPKFNRIWPNISSLEVSNPKQECYCNPLGSIHDRCNGSGFCECKTGTTGPKCDECLPGNSWHYGCQPNVCDNELLHCQNGGTCHNNVRCLCPAAYTGILCEKLRCEEAGSCGSD

SEQ ID NO: 207 - protein, 153 aa, Homo sapiens
PIPKGTANTCIPSISSIGNPPKFNRIWPNISSLEVSNPKQVAPKLALSTVSSVQVANHKRECYCNPLGSIHDRCNGSGFCECKTGTTGPKCDECLPGNSWHYGCQPNVCDNELLHCQNGGTCHNNVRCLCPAAYTGILCEKLRCEEAGSCGSD

SEQ ID NO: 208 - protein, 539 aa, Mus musculus
MYLSRFLSIHALWVTVSSVMQPYLFVWGHYDVCKSLIYTEEGKVWDYTACQPESTDMTKYLKVKLDPPDITCGDPPESFCAMGNPYMCNNECDASTPELAHPPELMFDFEGRHPSTFWQSATWKEYPKPLQVNITLSWSKTIELTDNIVITFESGRPDQMILEKSLDYGRTWQPYQYYATDCLHAFHMDPKSVKDLSQHTVLEIICTEEYSTGYSTNSKIIHFEIKDRFAFFAGPRLRNMASLYGQLDTTKKLRDFFTVTDLRIRLLRPAVGEIFVDELHLARYFYAISDIKVRGRCKCNLHATSCLYDNSKLTCECEHNTTGPDCGKCKKNYQGRPWSPGSYLPIPKGTANTCIPSISSIGNCECFGHSNRCSYIDLLNTVICVSCKHNTRGQHCELCRLGYFRNASAQLDDENVCIECYCNPLGSIHDRCNGSGFCECKTGTTGPKCDECLPGNSWYYGCQPNVCDNELLHCQNGGTCQNNVRCACPDAYTGILCEKLRCEEAGSCGSESGQGAPPRGSPALLLLTMLLGTAGPLVF

SEQ ID NO: 209 - protein, 483 aa, Mus musculus
MYLSRFLSIHALWVTVSSVMQPYLFVWGHYDVCKSLIYTEEGKVWDYTACQPESTDMTKYLKVKLDPPDITCGDPPESFCAMGNPYMCNNECDASTPELAHPPELMFDFEGRHPSTFWQSATWKEYPKPLQVNITLSWSKTIELTDNIVITFESGRPDQMILEKSLDYGRTWQPYQYYATDCLHAFHMDPKSVKDLSQHTVLEIICTEEYSTGYSTNSKIIHFEIKDRFAFFAGPRLRNMASLYGQLDTTKKLRDFFTVTDLRIRLLRPAVGEIFVDELHLARYFYAISDIKVRGRCKCNLHATSCLYDNSKLTCECEHNTTGPDCGKCKKNYQGRPWSPGSYLPIPKGTANTCIPSISSIGKCYCNPLGSIHDRCNGSGFCECKTGTTGPKCDECLPGNSWYYGCQPNVCDNELLHCQNGGTCQNNVRCACPDAYTGILCEKLRCEEAGSCGSESGQGAPPRGSPALLLLTMLLGTAGPLVF

SEQ ID NO: 210 - protein, 438 aa, Mus musculus
MYLSRFLSIHALWVTVSSVMQPYLFVWGHYDVCKSLIYTEEGKVWDYTACQPESTDMTKYLKVKLDPPDITCGDPPESFCAMGNPYMCNNECDASTPELAHPPELMFDFEGRHPSTFWQSATWKEYPKPLQVNITLSWSKTIELTDNIVITFESGRPDQMILEKSLDYGRTWQPYQYYATDCLHAFHMDPKSVKDLSQHTVLEIICTEEYSTGYSTNSKIIHFEIKDRFAFFAGPRLRNMASLYGQLDTTKKLRDFFTVTDLRIRLLRPAVGEIFVDELHLARYFYAISDIKVRGRCKCNLHATSCLYDNSKLTCECEHNTTGPDCGKCKKNYQGRPWSPGSYLPIPKGTANTCIPSISSIGTNVCDNELLHCQNGGTCQNNVRCACPDAYTGILCEKLRCEEAGSCGSESGQGAPPRGSPALLLLTMLLGTAGPLVF

SEQ ID NO: 211 - protein, 480 aa, Mus musculus
MYLSRFLSIHALWVTVSSVMQPYLFVWGHYDVCKSLIYTEEGKVWDYTACQPESTDMTKYLKVKLDPPDITCGDPPESFCAMGNPYMCNNECDASTPELAHPPELMFDFEGRHPSTFWQSATWKEYPKPLQVNITLSWSKTIELTDNIVITFESGRPDQMILEKSLDYGRTWQPYQYYATDCLHAFHMDPKSVKDLSQHTVLEIICTEEYSTGYSTNSKIIHFEIKDRFAFFAGPRLRNMASLYGQLDTTKKLRDFFTVTDLRIRLLRPAVGEIFVDELHLARYFYAISDIKVRGRCKCNLHATSCLYDNSKLTCECEHNTTGPDCGKCKKNYQGRPWSPGSYLPIPKGTANTCIPSISSIGTPPKFNRIWPNISSLEVSNPKQVAPKLALSTVSSVQVANHKRANVCDNELLHCQNGGTCQNNVRCACPDAYTGILCEKLRCEEAGSCGSESGQGAPPRGSPALLLLTMLLGTAGPLVF

SEQ ID NO: 212 - protein, 460 aa, Mus musculus
MYLSRFLSIHALWVTVSSVMQPYLFVWGHYDVCKSLIYTEEGKVWDYTACQPESTDMTKYLKVKLDPPDITCGDPPESFCAMGNPYMCNNECDASTPELAHPPELMFDFEGRHPSTFWQSATWKEYPKPLQVNITLSWSKTIELTDNIVITFESGRPDQMILEKSLDYGRTWQPYQYYATDCLHAFHMDPKSVKDLSQHTVLEIICTEEYSTGYSTNSKIIHFEIKDRFAFFAGPRLRNMASLYGQLDTTKKLRDFFTVTDLRIRLLRPAVGEIFVDELHLARYFYAISDIKVRGRCKCNLHATSCLYDNSKLTCECEHNTTGPDCGKCKKNYQGRPWSPGSYLPIPKGTANTCIPSISSIGTPPKFNRIWPNISSLEVSNPKQANVCDNELLHCQNGGTCQNNVRCACPDAYTGILCEKLRCEEAGSCGSESGQGAPPRGSPALLLLTMLLGTAGPLVF

SEQ ID NO: 213 - protein, 364 aa, Mus musculus
MYLSRFLSIHALWVTVSSVMQPYLFVWGHYDVCKSLIYTEEGKVWDYTACQPESTDMTKYLKVKLDPPDITCGDPPESFCAMGNPYMCNNECDASTPELAHPPELMFDFEGRHPSTFWQSATWKEYPKPLQVNITLSWSKTIELTDNIVITFESGRPDQMILEKSLDYGRTWQPYQYYATDCLHAFHMDPKSVKDLSQHTVLEIICTEEYSTGYSTNSKIIHFEIKDRFAFFAGPRLRNMASLYGQLDTTKKLRDFFTVTDLRIRLLRPAVGEIFVDELHLARYFYAISDIKVRGRCKCNLHATSCLYDNSKLTCECEHNTTGPDCGKCKKNYQGRPWSPGSYLPIPKGTANTCIPSISSIGSK

SEQ ID NO: 214 - protein, 530 aa, Homo sapiens
MLHLLALFLHCLPLASGDYDICKSWVTTDEGPTWEFYACQPKVMRLKDYVKVKVEPSGITCGDPPERFCSHENPYLCSNECDASNPDLAHPPRLMFDKEEEGLATYWQSITWSRYPSPLEANITLSWNKTVELTDDVVMTFEYGRPTVMVLEKSLDNGRTWQPYQFYAEDCMEAFGMSARRARDMSSSSAHRVLCTEEYSRWAGSKKEKHVRFEVRDRFAIFAGPDLRNMDNLYTRLESAKGLKEFFTLTDLRMRLLRPALGGTYVQRENLYKYFYAISNIEVIGRCKCNLHANLCSMREGSLQCECEHNTTGPDCGKCKKNFRTRSWRAGSYLPLPHGSPNACATAGSFGNCECYGHSNRCSYIDFLNVVTCVSCKHNTRGQHCQHCRLGYYRNGSAELDDENVCIECNCNQIGSVHDRCNETGFCECREGAAGPKCDDCLPTHYWRQGCYPNVCDDDQLLCQNGGTCLQNQRCACPRGYTGVRCEQPRCDPADDDGGLDCDRAPGAAPRPATLLGCLLLLGLAARLGR

SEQ ID NO: 215 - protein, 531 aa, Bos taurus
MLRLLALLLHCLALASGDYDICKSWVTTDEGPTWEFYACQPKVMRLKDYVKVKVEPSGITCGDPPERFCSHENPYLCSNECDASNPDLAHPPRLMFDREDEGLATYWQSVTWSRYPSPLEANITLSWNKSVELTDDVVVTFEYGRPTVMVLEKSLDNGRTWQPYQFYAEDCMEAFGMPARRARDLSASGAHRVLCTEEYSRWAGSKKEKHVRFEVRDRFAIFAGPDLRNMDNLYTRLESAKGLKEFFTLTDLRMRLLRPALGGTYVQRENLYKYFYAISNIEVTGRCKCNLHANLCSVREGSLQCECEHNTTGPDCGKCKRSFRTRSWRAGSYLPLPHGSPNACAAAGSAVGNCECYGHSNRCSYIDFLNVVTCVSCKHNTRGQHCQHCRLGYYRNGSAELDDENVCIECNCNQIGSVHDRCNETGFCECREGAAGPKCDDCLPTHYWRQGCYPNVCDDDQLLCQNGGTCVQNQRCACPRGYTGARCEQPRCDPADDEGGLDCDRAPGAAPRPATLLGCLLLLGLAARLDC

SEQ ID NO: 216 - protein, 530 aa, Mus musculus
MLRLLALFLHCLPLVSGDYDICKSWVTTDEGPTWEFYACQPKVMRLKDYVKVKVEPSGITCGDPPERFCSHENPYLCSNECDASNPDLAHPPRLMFDREDEGLATYWQSVTWSRYPSPLEANITLSWNKSVELTDDVVVTFEYGRPTVMVLEKSLDNGRTWQPYQFYAEDCMEAFGMSARRARDMSPSSAHRVLCTEEYSRWAGSKKEKHVRFEVRDRFAIFAGPDLRNMDNLYTRMESAKGLKEFFTFTDLRMRLLRPALGGTYVQRENLYKYFYAISNIEVIGRCKCNLHANLCTVREGSLQCECEHNTTGPDCGRCKKNFRTRAWRAGSYLPLPHGSPNACAAAGSAFGNCECYGHSNRCSYIDFLNVVTCVSCKHNTRGQHCQHCRLGYYRNGSAELDDENVCIECNCNQIGSVHDRCNETGFCECREGAVGPKCDDCLPTHYWRQGCYPNVCDDDQLLCQNGGTCQQNQRCACPPGYTGIRCEQPRCDLADDAGPDCDRAPGIVPRPDTLLGCLLLLGLAARLAC

SEQ ID NO: 217 - protein, 1584 aa, Homo sapiens
MRGQAAAPGPVWILAPLLLLLLLLGRRARAAAGADAGPGPEPCATLVQGKFFGYFSAAAVFPANASRCSWTLRNPDPRRYTLYMKVAKAPVPCSGPGRVRTYQFDSFLESTRTYLGVESFDEVLRLCDPSAPLAFLQASKQFLQMRRQQPPQHDGLRPRAGPPGPTDDFSVEYLVVGNRNPSRAACQMLCRWLDACLAGSRSSHPCGIMQTPCACLGGEAGGPAAGPLAPRGDVCLRDAVAGGPENCLTSLTQDRGGHGATGGWKLWSLWGECTRDCGGGLQTRTRTCLPAPGVEGGGCEGVLEEGRQCNREACGPAGRTSSRSQSLRSTDARRREELGDELQQFGFPAPQTGDPAAEEWSPWSVCSSTCGEGWQTRTRFCVSSSYSTQCSGPLREQRLCNNSAVCPVHGAWDEWSPWSLCSSTCGRGFRDRTRTCRPPQFGGNPCEGPEKQTKFCNIALCPGRAVDGNWNEWSSWSACSASCSQGRQQRTRECNGPSYGGAECQGHWVETRDCFLQQCPVDGKWQAWASWGSCSVTCGAGSQRRERVCSGPFFGGAACQGPQDEYRQCGTQRCPEPHEICDEDNFGAVIWKETPAGEVAAVRCPRNATGLILRRCELDEEGIAYWEPPTYIRCVSIDYRNIQMMTREHLAKAQRGLPGEGVSEVIQTLVEISQDGTSYSGDLLSTIDVLRNMTEIFRRAYYSPTPGDVQNFVQILSNLLAEENRDKWEEAQLAGPNAKELFRLVEDFVDVIGFRMKDLRDAYQVTDNLVLSIHKLPASGATDISFPMKGWRATGDWAKVPEDRVTVSKSVFSTGLTEADEASVFVVGTVLYRNLGSFLALQRNTTVLNSKVISVTVKPPPRSLRTPLEIEFAHMYNGTTNQTCILWDETDVPSSSAPPQLGPWSWRGCRTVPLDALRTRCLCDRLSTFAILAQLSADANMEKATLPSVTLIVGCGVSSLTLLMLVIIYVSVWRYIRSERSVILINFCLSIISSNALILIGQTQTRNKVVCTLVAAFLHFFFLSSFCWVLTEAWQSYMAVTGHLRNRLIRKRFLCLGWGLPALVVAISVGFTKAKGYSTMNYCWLSLEGGLLYAFVGPAAAVVLVNMVIGILVFNKLVSKDGITDKKLKERAGASLWSSCVVLPLLALTWMSAVLAVTDRRSALFQILFAVFDSLEGFVIVMVHCILRREVQDAVKCRVVDRQEEGNGDSGGSFQNGHAQLMTDFEKDVDLACRSVLNKDIAACRTATITGTLKRPSLPEEEKLKLAHAKGPPTNFNSLPANVSKLHLHGSPRYPGGPLPDFPNHSLTLKRDKAPKSSFVGDGDIFKKLDSELSRAQEKALDTSYVILPTATATLRPKPKEEPKYSIHIDQMPQTRLIHLSTAPEASLPARSPPSRQPPSGGPPEAPPAQPPPPPPPPPPPPQQPLPPPPNLEPAPPSLGDPGEPAAHPGPSTGPSTKNENVATLSVSSLERRKSRYAELDFEKIMHTRKRHQDMFQDLNRKLQHAAEKDKEVLGPDSKPEKQQTPNKRPWESLRKAHGTPTWVKKELEPLQPSPLELRSVEWERSGATIPLVGQDIIDLQTEV

SEQ ID NO: 218 - protein, 1549 aa, Mus musculus
MTPACPLLLSVILSLRLATAFDPAPSACSALASGVLYGAFSLQDLFPTIASGCSWTLENPDPTKYSLYLRFNRQEQVCTHFAPRLLPLDHYLVNFTCLRPGPEEATARAESEVGRPEEEEEEAAAAASGLELCGGSGPFTFLHFDKNFVQLCLSAEPSEAPRLLAPAALAFRFVEVLLINNNNSSQFTCGVLCRWSEECGRAAGRACGFAQPGCSCPGEAGANPATTTSPGPPVAHTLSNALVPGGPAPPAEADLHSGSSNDLFTTEMRYGEEPEEEPKVKTQWPRSADEPGLYMAQTGDPAAEEWSPWSVCSLTCGQGLQVRTRSCVSSPYGTLCSGPLRETRPCNNSATCPVHGVWEEWGSWSLCSRSCGRGSRSRMRTCVPPQHGGKACEGPELQTKLCSMAACPVEGQWLEWGPWGPCSSSCANGTQQRSRKCSVAGPAWATCAGALTDTRECSNLDCPATDGKWGPWNAWSLCSKTCDTGWQRRFRMCQASGTQGYPCEGTGEEVKPCSEKRCPAFHEMCRDEYVMLMTWKRAAAGEIIYNKCPPNASGSASRRCLLSAQGVAYWGLPSFARCISHEYRYLYLSLREHLAKGQRMLAGEGMSQVVRSLQELLARRTYYSGDLLFSVDILRNVTDTFKRATYVPSADDVQRFFQVVSFMVDSENKDKWDDAQQVSPGSVHLLRVVEDFIHLVGDALKAFQSSLIVTDNLVISIQREPISAVSSDITFPMRGRRGMKDWVRHSEDRLFLPKEVLSLSSPGKPATPGAATAGSPGRGRGPGTVPPGPGHAHQRLLPADPEESSSYFVIGAVLYRTLGLILPPPRPPLAVTSRVMTVTVRPPTQPPAEPLITVELSYIINGTTDPHCASWDYSRADTNSGDWNTESCQTLETQAAHTRCQCQHLSTFAVLAQPPKDLTLELAGAPSVPLVIGCAVSCMALLTLLAIYAAFWRFIKSERSIILLNFCLSILASNILILVGQSRVLSKGVCTMTAAFLHFFFLSSFCWVLTEAWQSYLAVIGRMRTRLVRKRFLCLGWGLPALVVAVSVGFTRTKGYGTSSYCWLSLEGGLLYAFVGPAAVIVLVNMLIGIIVFNKLMARDGVSDKSKKQRAGRLSWNLWGYGSQLCLFPKLPRASLWSSCVVLPLLALTWMSAVLAMTDRRSVLFQALFAVFNSAQGFVITAVHCFLRREVQDVVKCQMGVCRADESEDSPDSCKNGQLQILSDFEKDVDLACQTVLFKEVNTCNPSTITGTLSRLSLDEDEEPKSCLVGPEGGLSFSPLPGNILVPMAASPGLGEPPPPQETNPVYMCGEGGLRQLDLTWIRQSEPGSEGDYMVLPRRTLSLQPGGGGTAGEEAPRARPEGTPRRAAKTVAHTEGYPSFLSVEHSGLGLGPAYGSLQNPYGMTFQPPPPTPSARQVPEPGERSRTMPRTVPGSTMKLGSLERKKLRYSDLDFEKVMHTRKRHSELYHELNQKFHTFDRYRSQSSAKEKPSPPGGRPGLSQHRRHQSWSTFKSMTLGSLPPKPRERLALHRTAAWEPTEPPDGDFQTEV

SEQ ID NO: 219 - protein, 723 aa, Homo sapiens
MGSRCALALAVLSALLCQVWSSGVFELKLQEFVNKKGLLGNRNCCRGGAGPPPCACRTFFRVCLKHYQASVSPEPPCTYGSAVTPVLGVDSFSLPDGGGADSAFSNPIRFPFGFTWPGTFSLIIEALHTDSPDDLATENPERLISRLATQRHLTVGEEWSQDLHSSGRTDLKYSYRFVCDEHYYGEGCSVFCRPRDDAFGHFTCGERGEKVCNPGWKGPYCTEPICLPGCDEQHGFCDKPGECKCRVGWQGRYCDECIRYPGCLHGTCQQPWQCNCQEGWGGLFCNQDLNYCTHHKPCKNGATCTNTGQGSYTCSCRPGYTGATCELGIDECDPSPCKNGGSCTDLENSYSCTCPPGFYGKICELSAMTCADGPCFNGGRCSDSPDGGYSCRCPVGYSGFNCEKKIDYCSSSPCSNGAKCVDLGDAYLCRCQAGFSGRHCDDNVDDCASSPCANGGTCRDGVNDFSCTCPPGYTGRNCSAPVSRCEHAPCHNGATCHERGHRYVCECARGYGGPNCQFLLPELPPGPAVVDLTEKLEGQGGPFPWVAVCAGVILVLMLLLGCAAVVVCVRLRLQKHRPPADPCRGETETMNNLANCQREKDISVSIIGATQIKNTNKKADFHGDHSADKNGFKARYPAVDYNLVQDLKGDDTAVRDAHSKRDTKCQPQGSSGEEKGTPTTLRGGEASERKRPDSGCSTSKDTKYQSVYVISEEKDECVIATEV

SEQ ID NO: 220 - protein, 308 aa, Bos taurus
MAATAALLPALLLLLAFGRSAHGAECFPACHPENGFCDDDSVCRCQPGWQGPLCDQCVTFPGCVNGLCVEPWQCICKDGWDGHLCDLDIRACTSTPCANNGTCLNLDDGQYECSCAPGFSGKDCQEMDGPCVVNGSPCQHGGSCVDDEGRAPHAVCLCPPGFSGNFCEIVTNSCIPNPCENQGICTDIGGDFRCRCPAGFMDKTCSRPVNTCTSEPCLNGGTCLQHSQAICFTILGVLTSLVVLGTMGIVFLNKCEAWVSNLRYNHMLRKKKNLLLHYNSGEELAVNIVFPEKIDMTTFTKEAGEEEI

SEQ ID NO: 221 - protein, 722 aa, Mus musculus
MGRRSALALAVVSALLCQVWSSGVFELKLQEFVNKKGLLGNRNCCRGGSGPPCACRTFFRVCLKHYQASVSPEPPCTYGSAVTPVLGVDSFSLPDGAGIDPAFSNPIRFPFGFTWPGTFSLIIEALHTDSPDDLATENPERLISRLTTQRHLTVGEEWSQDLHSSGRTDLRYSYRFVCDEHYYGEGCSVFCRPRDDAFGHFTCGDRGEKMCDPGWKGQYCTDPICLPGCDDQHGYCDKPGECKCRVGWQGRYCDECIRYPGCLHGTCQQPWQCNCQEGWGGLFCNQDLNYCTHHKPCRNGATCTNTGQGSYTCSCRPGYTGANCELEVDECAPSPCKNGASCTDLEDSFSCTCPPGFYGKVCELSAMTCADGPCFNGGRCSDNPDGGYTCHCPLGFSGFNCEKKMDLCGSSPCSNGAKCVDLGNSYLCRCQAGFSGRYCEDNVDDCASSPCANGGTCRDSVNDFSCTCPPGYTGKNCSAPVSRCEHAPCHNGATCHQRGQRYMCECAQGYGGPNCQFLLPEPPPGPMVVDLSERHMESQGGPFPWVAVCAGVVLVLLLLLGCAAVVVCVRLKLQKHQPPPEPCGGETETMNNLANCQREKDVSVSIIGATQIKNTNKKADFHGDHGAEKSSFKVRYPTVDYNLVRDLKGDEATVRDTHSKRDTKCQSQSSAGEEKIAPTLRGGEIPDRKRPESVYSTSKDTKYQSVYVLSAEKDECVIATEV

SEQ ID NO: 222 - protein, 714 aa, Rattus norvegicus
MGRRSALALAVVSALLCQVWSSGVFELKLQEFVNKKGLLGNRNCCRGGSGPPCACRTFFRVCLKHYQASVSPEPPCTYGSAVTAVLGVDSFSLPDGAGIDPAFSNPIRFPFGFTWPGTFSLIIEALHTDSPDDLATENPERLISRLTTQRHLTVGEEWSQDLHSSGRTDLRYSYRFVCDEHYYGEGCSVFCRPRDDAFGHFTCGERGEKMCDPGWKGQYCTDPICLPGCDDQHGYCDKPGECKCRVGWQGRYCDECIRYPGCLHGTCQQPWQCNCQEGWGGLFCNQDLNYCTHHKPCRNGATCTNTGQGSYTCSCRPGYTGANCELEVDECAPSPCRNGGSCTDLEDSYSCTCPPGFYGKVCELSAMTCADGPCFNGGRCSDNPDGGYTCHCPAGFSGFNCEKKIDLCSSSPCSNGAKCVDLGNSYLCRCQTGFSGRYCEDNVDDCASSPCANGGTCRDSVNDFSCTCPPGYTGRNCSAPVSRCEHAPCHNGATCHQRGQRYMCECAQGYGGANCQFLLPEPPPDLIVAAQGGSFPWVAVCAGVVLVLLLLLGCAAVVVCVRLKLQKHQPPPDPCGGETETMNNLANCQREKDVSVSIIGATQIKNTNKKADFHGDHGADKSSFKARYPTVDYNLIRDLKGDEATVRDAHSKRDTKCQSQGSVGEEKSTSTLRGGEVPDRKRPESVYSTSKDTKYQSVYVLSAEKDECVIATEV

SEQ ID NO: 223 - protein, 618 aa, Homo sapiens
MVSPRMSGLLSQTVILALIFLPQTRPAGVFELQIHSFGPGPGPGAPRSPCSARLPCRLFFRVCLKPGLSEEAAESPCALGAALSARGPVYTEQPGAPAPDLPLPDGLLQVPFRDAWPGTFSFIIETWREELGDQIGGPAWSLLARVAGRRRLAAGGPWARDIQRAGAWELRFSYRARCEPPAVGTACTRLCRPRSAPSRCGPGLRPCAPLEDECEAPLVCRAGCSPEHGFCEQPGECRCLEGWTGPLCTVPVSTSSCLSPRGPSSATTGCLVPGPGPCDGNPCANGGSCSETPRSFECTCPRGFYGLRCEVSGVTCADGPCFNGGLCVGGADPDSAYICHCPPGFQGSNCEKRVDRCSLQPCRNGGLCLDLGHALRCRCRAGFAGPRCEHDLDDCAGRACANGGTCVEGGGAHRCSCALGFGGRDCRERADPCAARPCAHGGRCYAHFSGLVCACAPGYMGARCEFPVHPDGASALPAAPPGLRPGDPQRYLLPPALGLLVAAGVAGAALLLVHVRRRGHSQDAGSRLLAGTPEPSVHALPDALNNLRTQEGSGDGPSSSVDWNRPEDVDPQGIYVISAPSIYAREVATPLFPPLHTGRAGQRQHLLFPYPSSILSVK

SEQ ID NO: 224 - protein, 587 aa, Homo sapiens
MVSPRMSGLLSQTVILALIFLPQTRPAGVFELQIHSFGPGPGPGAPRSPCSARLPCRLFFRVCLKPGLSEEAAESPCALGAALSARGPVYTEQPGAPAPDLPLPDGLLQVPFRDAWPGTFSFIIETWREELGDQIGGPAWSLLARVAGRRRLAAGGPWARDIQRAGAWELRFSYRARCEPPAVGTACTRLCRPRSAPSRCGPGLRPCAPLEDECEAPLVCRAGCSPEHGFCEQPGECRCLEGWTGPLCTVPVSTSSCLSPRGPSSATTGCLVPGPGPCDGNPCANGGSCSETPRSFECTCPRGFYGLRCEVSGVTCADGPCFNGGLCVGGADPDSAYICHCPPGFQGSNCEKRVDRCSLQPCRNGGLCLDLGHALRCRCRAGFAGPRCEHDLDDCAGRACANGGTCVEGGGAHRCSCALGFGGRDCRERADPCAARPCAHGGRCYAHFSGLVCACAPGYMGARCEFPVHPDGASALPAAPPGLRPGDPQRYLLPPALGLLVAAGVAGAALLLVHVRRRGHSQDAGSRLLAGTPEPSVHALPDALNNLRTQEGSGDGPSSSVDWNRPEDVDPQGIYVISAPSIYAREA

SEQ ID NO: 225 - protein, 603 aa, Bos taurus
MVAPQMPQLLSSTVILALFFLPQAQPAGVFELQIHSFGPGPGPGTPRSPCKAGGSCRLFFRVCLKPGLSEETAEAPCTLGAALSARGPVYTAQPGALAPELRLPDGLLRVPFRDAWPGTFSLIIETWREELGGQIGGAAWSLLARVAGRRLLAAGGPWTRDVQRAGAWELRFSYRARCEPPAVGAACARLCRSRGAPLRCDPELRPCAPVEEECEAPPVCRAGCSPEHGFCEQPDECRCLEGWTGPLCTIPVSSSSCLSSRGPSSATTGCLVPGPGPCDGNPCANGGSCSETLGSFECTCPRGFYGLRCEVSGVTCADGPCFNGGLCVGGADPDSAYICHCPPGFQGSNCEKRVDRCSLQPCRNGGLCLDLGHALRCRCRAGFAGPRCEHDLEDCTGHTCANGGTCLEGGGARRCSCALGFGGRDCRERADPCAARPCAHGGRCYAHFSGLVCACAPGYMGARCEFPVHPDGAGALPAAQPGLREGDPQRFLLPPALGLLVAAGLAGAALLLVHVRRRGPSRDTGPRLLAGTPEPSVHALPDALNNMRTQEGPGDGPSPSSDWNHPEDGDARSIYVISAPSVYAREMTFGPQEVGSFELELRH

SEQ ID NO: 226 - protein, 585 aa, Mus musculus
MVSLQVSPLSQTLILAFLLPQALPAGVFELQIHSFGPGPGLGTPRSPCNARGPCRLFFRVCLKPGVSQEATESLCALGAALSTSVPVYTEHPGESAAALPLPDGLVRVPFRDAWPGTFSLVIETWREQLGEHAGGPAWNLLARVVGRRRLAAGGPWARDVQRTGTWELHFSYRARCEPPAVGAACARLCRSRSAPSRCGPGLRPCTPFPDECEAPSVCRPGCSPEHGYCEEPDECRCLEGWTGPLCTVPVSTSSCLNSRVPGPASTGCLLPGPGPCDGNPCANGGSCSETSGSFECACPRGFYGLRCEVSGVTCADGPCFNGGLCVGGEDPDSAYVCHCPPGFQGSNCEKRVDRCSLQPCQNGGLCLDLGHALRCRCRAGFAGPRCEHDLDDCAGRACANGGTCVEGGGSRRCSCALGFGGRDCRERADPCASRPCAHGGRCYAHFSGLVCACAPGYMGVRCEFAVRPDGADAVPAAPRGLRQADPQRFLLPPALGLLVAAGLAGAALLVIHVRRRGPGQDTGTRLLSGTREPSVHTLPDALNNLRLQDGAGDGPSSSADWNHPEDGDSRSIYVIPAPSIYAREA

SEQ ID NO: 227 - protein, 685 aa, Homo sapiens
MAAASRSASGWALLLLVALWQQRAAGSGVFQLQLQEFINERGVLASGRPCEPGCRTFFRVCLKHFQAVVSPGPCTFGTVSTPVLGTNSFAVRDDSSGGGRNPLQLPFNFTWPGTFSLIIEAWHAPGDDLRPEALPPDALISKIAIQGSLAVGQNWLLDEQTSTLTRLRYSYRVICSDNYYGDNCSRLCKKRNDHFGHYVCQPDGNLSCLPGWTGEYCQQPICLSGCHEQNGYCSKPAECLCRPGWQGRLCNECIPHNGCRHGTCSTPWQCTCDEGWGGLFCDQDLNYCTHHSPCKNGATCSNSGQRSYTCTCRPGYTGVDCELELSECDSNPCRNGGSCKDQEDGYHCLCPPGYYGLHCEHSTLSCADSPCFNGGSCRERNQGANYACECPPNFTGSNCEKKVDRCTSNPCANGGQCLNRGPSRMCRCRPGFTGTYCELHVSDCARNPCAHGGTCHDLENGLMCTCPAGFSGRRCEVRTSIDACASSPCFNRATCYTDLSTDTFVCNCPYGFVGSRCEFPVGLPPSFPWVAVSLGVGLAVLLVLLGMVAVAVRQLRLRRPDDGSREAMNNLSDFQKDNLIPAAQLKNTNQKKELEVDCGLDKSNCGKQQNHTLDYNLAPGPLGRGTMPGKFPHSDKSLGEKAPLRLHSEKPECRISAICSPRDSMYQSVCLISEERNECVIATEV

SEQ ID NO: 228 - protein, 685 aa, Bos taurus
MAVASRRASGWALLLLVALWQQPAAGSGVFQLQLQEFANERGVLASGRPCEPGCRTFFRVCLKHFQAVVSPGPCTFGSVSTPVLGTNSFAVGDNSSGGGRNPLQLPFNFTWPGTFSLIIEAWHAPGDDLRPEALPPDALISKIAIQGSLAVGQNWLLDEQTSPLTRLRYSYRVICSDNYYGDSCSRLCKKRNDHFGHYVCQPDGSLSCLPGWTGEYCEQPICLSGCHEQNGYCSKPAECICRPGWQGRLCNECIPHNGCRHGTCSTPWQCTCDEGWGGLFCDQDLNYCTHHSPCKNGATCSNSGQRSYTCTCRPGYTGVDCELELSECDSNPCRNGGSCKDQEDGYHCLCPPGYYGLHCEHSTLSCADSPCFNGGSCRERNQGTSYACECPPNFTGSNCEKKVDRCTSNPCANGGQCLNRGPNRVCRCRPGFTGAHCEINISDCARSPCVHGGTCHDLENGFVCTCPAGFSGRRCEVRMPAEACASGPCFNGATCYPGLPPDNFVCNCPYGFVGSRCEFRMSMPPTFPWVAVSLGVGLVVVLVLLCMVAVAVRQLRLRRPDGGSREAMNNLSDFQKDNLIPTAQLKNTNQKKELEVDCGLDKSNCGKQQNHTLDYNLAPGLLGRGILPGKYSHSDKSLGEKAPLRIHSEKPECRISAICSPRDSMYQSVCLISEERNECVIATEV

SEQ ID NO: 229 - protein, 686 aa, Mus musculus
MTPASRSACRWALLLLAVLWPQQRAAGSGIFQLRLQEFVNQRGMLANGQSCEPGCRTFFRICLKHFQATFSEGPCTFGNVSTPVLGTNSFVVRDKNSGSGRNPLQLPFNFTWPGTFSLNIQAWHTPGDDLRPETSPGNSLISQIIIQGSLAVGKIWRTDEQNDTLTRLSYSYRVICSDNYYGESCSRLCKKRDDHFGHYECQPDGSLSCLPGWTGKYCDQPICLSGCHEQNGYCSKPDECICRPGWQGRLCNECIPHNGCRHGTCSIPWQCACDEGWGGLFCDQDLNYCTHHSPCKNGSTCSNSGPKGYTCTCLPGYTGEHCELGLSKCASNPCRNGGSCKDQENSYHCLCPPGYYGQHCEHSTLTCADSPCFNGGSCRERNQGSSYACECPPNFTGSNCEKKVDRCTSNPCANGGQCQNRGPSRTCRCRPGFTGTHCELHISDCARSPCAHGGTCHDLENGPVCTCPAGFSGRRCEVRITHDACASGPCFNGATCYTGLSPNNFVCNCPYGFVGSRCEFPVGLPPSFPWVAVSLGVGLVVLLVLLVMVVVAVRQLRLRRPDDESREAMNNLSDFQKDNLIPAAQLKNTNQKKELEVDCGLDKSNCGKLQNHTLDYNLAPGLLGRGGMPGKYPHSDKSLGEKVPLRLHSEKPECRISAICSPRDSMYQSVCLISEERNECVIATEV

SEQ ID NO: 230 - protein, 1218 aa, Homo sapiens
MRSPRTRGRSGRPLSLLLALLCALRAKVCGASGQFELEILSMQNVNGELQNGNCCGGARNPGDRKCTRDECDTYFKVCLKEYQSRVTAGGPCSFGSGSTPVIGGNTFNLKASRGNDRNRIVLPFSFAWPRSYTLLVEAWDSSNDTVQPDSIIEKASHSGMINPSRQWQTLKQNTGVAHFEYQIRVTCDDYYYGFGCNKFCRPRDDFFGHYACDQNGNKTCMEGWMGPECNRAICRQGCSPKHGSCKLPGDCRCQYGWQGLYCDKCIPHPGCVHGICNEPWQCLCETNWGGQLCDKDLNYCGTHQPCLNGGTCSNTGPDKYQCSCPEGYSGPNCEIAEHACLSDPCHNRGSCKETSLGFECECSPGWTGPTCSTNIDDCSPNNCSHGGTCQDLVNGFKCVCPPQWTGKTCQLDANECEAKPCVNAKSCKNLIASYYCDCLPGWMGQNCDININDCLGQCQNDASCRDLVNGYRCICPPGYAGDHCERDIDECASNPCLNGGHCQNEINRFQCLCPTGFSGNLCQLDIDYCEPNPCQNGAQCYNRASDYFCKCPEDYEGKNCSHLKDHCRTTPCEVIDSCTVAMASNDTPEGVRYISSNVCGPHGKCKSQSGGKFTCDCNKGFTGTYCHENINDCESNPCRNGGTCIDGVNSYKCICSDGWEGAYCETNINDCSQNPCHNGGTCRDLVNDFYCDCKNGWKGKTCHSRDSQCDEATCNNGGTCYDEGDAFKCMCPGGWEGTTCNIARNSSCLPNPCHNGGTCVVNGESFTCVCKEGWEGPICAQNTNDCSPHPCYNSGTCVDGDNWYRCECAPGFAGPDCRININECQSSPCAFGATCVDEINGYRCVCPPGHSGAKCQEVSGRPCITMGSVIPDGAKWDDDCNTCQCLNGRIACSKVWCGPRPCLLHKGHSECPSGQSCIPILDDQCFVHPCTGVGECRSSSLQPVKTKCTSDSYYQDNCANITFTFNKEMMSPGLTTEHICSELRNLNILKNVSAEYSIYIACEPSPSANNEIHVAISAEDIRDDGNPIKEITDKIIDLVSKRDGNSSLIAAVAEVRVQRRPLKNRTDFLVPLLSSVLTVAWICCLVTAFYWCLRKRRKPGSHTHSASEDNTTNNVREQLNQIKNPIEKHGANTVPIKDYENKNSKMSKIRTHNSEVEEDDMDKHQQKARFAKQPAYTLVDREEKPPNGTPTKHPNWTNKQDNRDLESAQSLNRMEYIV

SEQ ID NO: 231 - protein, 1218 aa, Bos taurus
MRSPRTRGRPGRPLSLLLALLCALRAKVCGASGQFELEILSMENVNGELQNGNCCGGSRNPGDRKCSRDECDTYFKVCLKEYQSRVTAGGPCSFGSGSTPVIGGNTFDLKASRGNERNRIVLPFSFAWPRSYTLLVEAWDSSNDTVQPDSIIEKASYSGMINPGRQWQTLKQNTGVAHFEYQIRVTCDDYYYGFGCNKFCRPRDDFFGHYACDQNGNKTCMEGWMGPECNKAICRQGCSPKHGSCKLPGDCRCQYGWQGLYCDKCIPHPGCVHGTCNEPWQCLCETNWGGQLCDKDLNYCGTHQPCLNGGTCSNTGPDKYQCSCPEGYSGPNCEIAEHACLSDPCHNRGSCKETSLGFECECSPGWTGPTCSTNIDDCSPNNCAHGGTCQDLVNGFQCVCPPQWTGKTCQLDANECEAKPCVNARSCKNLIASYYCNCLPGWMGQNCDININDCVGQCQNDASCRDLVNGYRCICPPGYAGDHCETDIDECASNPCLNGGHCQNEINRFQCLCPTGFSGNLCQLDIDYCEPNPCQNGAQCYNRASDYFCKCPEDYEGKNCSHLKDHCRTTPCEVIDSCTVAMASNDTPEGVRYISSNVCGPHGKCKSQSGGKFTCDCNKGFTGTYCHENINDCESNPCRNGGTCIDGVNSYACICSGGWEGAHCETNINDCSQNPCHNGGSCRDLVNDFYCDCKNGWKGKTCHSRDSQCDEATCNNGGTCYDEGDAFKCMCPGGWEGTTCNIARNSSCLPSPCHNGGTCVVNGESFTCVCKEGWEGPICTQNTNDCSPHPCYNSGTCVDGENWYRCECAPGFAGPDCRININECQSSPCAFGATCVDEINGYRCICPPGHSGAKCQEVSGRSCVTMGSVIPDGAKWDADCNACQCLDGRVACSKVWCGPRPCSLHRGHSECPSGQSCVPILDTQCFVRPCTGVGECRSSSLQPVKTKCASDPYYQDNCANITFTFNKEMMSPGLTTEHICSELRNLNILKNVSAEYSIYIACEPSPSANNEIHVAISAEDIRDDGNPIKEITDKIINLVSKRDGNSSLIAAVAEVRVQRRPLKSRTDFLVPLLSSVLTVAWVCCLVTAFYWCVRKRRKPGSHARAASEDNTTNNVREQLNQIKNPIEKHGANTVPVKDYESKNSKMSKIRTHNSEVEEDDMDKHQQKARFAKQATYTLVDREEKPAHGTPAKHPNWTNKQDNRDLESAQSLNRMEYIV

SEQ ID NO: 232 - protein, 1218 aa, Sus scrofa
MRSPRTRGRPGRPLSLLLALLCALRAKVCWASGQFELEILSMQNVNGELQNGNCCGGARNPGDRKCSRDECDTYFKVCLKEYQWRVTAGGPCSFGSGSTPVIGGNNFNLKASRGNERNRIVLPFSFAWPRSYTLLVEAWDSSNDTVQPDSIIEKASYSGMINPSRQWQTLKQNTGVAHFEYQIRVTCDEHYYGFGCNKFCRPRDDFFGHYACDQNGNKTCMEGWMGPECNKAICRQGCSPKHGSCKLPGDCRCQYGWQGLYCDKCIPHPGCVHGTCNEPWQCLCETNWGGQLCDKDLNYCGTHQPCLNGGTCSNTGPDKYQCSCPEGYSGPNCEIAEHACLSDPCHNRGSCKETSLGFECECSPGWTGPTCSTNIDDCSPNNCSHGGTCQDLVNGFKCVCPPQWTGKTCQLDANECEAKPCVNAKSCKNLIASYYCDCLPGWMGQNCDININDCLGQCQNGASCRDLVNGYRCVCPPGYAGDHCETDIDECSSNPCLNGGHCQNEINRFQCLCPTGFSGNLCQLDIDYCEPNPCQNGAQCFNRASDYFCKCPEDYEGKNCSHLKDHCRTTPCEVIDSCTVAMASNDTPEGVRYISSNVCGPHGKCKSQSGGKFTCDCNKGFTGTYCHENINDCESNPCKNGGTCIDGVNSYKCICSDGWEGAYCETNINDCSQNPCHNGGSCRDLVNDFYCDCKNGWKGKTCHSRDSQCDEATCNNGGTCYDEGDTFKCMCPGGWEGTTCNIARNSSCLPNPCHNGGTCVVNGESFTCVCKEGWEGPICTQNTNDCSPHPCYNSGTCVDGDNWYRCECAPGFAGPDCRININECQSSPCAFGATCVDEINGYRCVCPPGHSGAKCQEVSGRPCITVGSVIPDGAKWDDDCNACQCLDGRIACSKVWCGPRPCSLHKGHSECPSGQSCIPILDTQCFVRPCTGVGECRSASFQPVKTKCASDPYYQDNCANITFTFNKEMMSPGLTTEHICSELRNLNILKNVSAEYSIYIACEPSPSANNEIHVAISAEDIRDDGNPIKEITDKIIDLVSKRDGNSSLIAAVAEVRVQRRPLKNRTDFLVPLLSSVLTVAWVCCLVTAFYWCVRKRRKPSSHARSASEDNTTNNVREQLNQIKNPIEKHGANTVPIKDYENKNSKMSKIRTHNSEVEEDDMDKHQQKARFAKQATYTLVDREEKPPNGTPAKHPNWTNKQDNRDLESAQSLNRMEYIV

SEQ ID NO: 233 - protein, 1218 aa, Mus musculus
MRSPRTRGRPGRPLSLLLALLCALRAKVCGASGQFELEILSMQNVNGELQNGNCCGGVRNPGDRKCTRDECDTYFKVCLKEYQSRVTAGGPCSFGSGSTPVIGGNTFNLKASRGNDRNRIVLPFSFAWPRSYTLLVEAWDSSNDTIQPDSIIEKASHSGMINPSRQWQTLKQNTGIAHFEYQIRVTCDDHYYGFGCNKFCRPRDDFFGHYACDQNGNKTCMEGWMGPDCNKAICRQGCSPKHGSCKLPGDCRCQYGWQGLYCDKCIPHPGCVHGTCNEPWQCLCETNWGGQLCDKDLNYCGTHQPCLNRGTCSNTGPDKYQCSCPEGYSGPNCEIAEHACLSDPCHNRGSCKETSSGFECECSPGWTGPTCSTNIDDCSPNNCSHGGTCQDLVNGFKCVCPPQWTGKTCQLDANECEAKPCVNARSCKNLIASYYCDCLPGWMGQNCDININDCLGQCQNDASCRDLVNGYRCICPPGYAGDHCERDIDECASNPCLNGGHCQNEINRFQCLCPTGFSGNLCQLDIDYCEPNPCQNGAQCYNRASDYFCKCPEDYEGKNCSHLKDHCRTTTCEVIDSCTVAMASNDTPEGVRYISSNVCGPHGKCKSQSGGKFTCDCNKGFTGTYCHENINDCESNPCKNGGTCIDGVNSYKCICSDGWEGAHCENNINDCSQNPCHYGGTCRDLVNDFYCDCKNGWKGKTCHSRDSQCDEATCNNGGTCYDEVDTFKCMCPGGWEGTTCNIARNSSCLPNPCHNGGTCVVNGDSFTCVCKEGWEGPICTQNTNDCSPHPCYNSGTCVDGDNWYRCECAPGFAGPDCRININECQSSPCAFGATCVDEINGYQCICPPGHSGAKCHEVSGRSCITMGRVILDGAKWDDDCNTCQCLNGRVACSKVWCGPRPCRLHKSHNECPSGQSCIPVLDDQCFVRPCTGVGECRSSSLQPVKTKCTSDSYYQDNCANITFTFNKEMMSPGLTTEHICSELRNLNILKNVSAEYSIYIACEPSLSANNEIHVAISAEDIRDDGNPVKEITDKIIDLVSKRDGNSSLIAAVAEVRVQRRPLKNRTDFLVPLLSSVLTVAWVCCLVTAFYWCVRKRRKPSSHTHSAPEDNTTNNVREQLNQIKNPIEKHGANTVPIKDYENKNSKMSKIRTHNSEVEEDDMDKHQQKVRFAKQPVYTLVDREEKAPSGTPTKHPNWTNKQDNRDLESAQSLNRMEYIV

SEQ ID NO: 234 - protein, 1238 aa, Homo sapiens
MRAQGRGRLPRRLLLLLALWVQAARPMGYFELQLSALRNVNGELLSGACCDGDGRTTRAGGCGHDECDTYVRVCLKEYQAKVTPTGPCSYGHGATPVLGGNSFYLPPAGAAGDRARARARAGGDQDPGLVVIPFQFAWPRSFTLIVEAWDWDNDTTPNEELLIERVSHAGMINPEDRWKSLHFSGHVAHLELQIRVRCDENYYSATCNKFCRPRNDFFGHYTCDQYGNKACMDGWMGKECKEAVCKQGCNLLHGGCTVPGECRCSYGWQGRFCDECVPYPGCVHGSCVEPWQCNCETNWGGLLCDKDLNYCGSHHPCTNGGTCINAEPDQYRCTCPDGYSGRNCEKAEHACTSNPCANGGSCHEVPSGFECHCPSGWSGPTCALDIDECASNPCAAGGTCVDQVDGFECICPEQWVGATCQLDANECEGKPCLNAFSCKNLIGGYYCDCIPGWKGINCHINVNDCRGQCQHGGTCKDLVNGYQCVCPRGFGGRHCELERDECASSPCHSGGLCEDLADGFHCHCPQGFSGPLCEVDVDLCEPSPCRNGARCYNLEGDYYCACPDDFGGKNCSVPREPCPGGACRVIDGCGSDAGPGMPGTAASGVCGPHGRCVSQPGGNFSCICDSGFTGTYCHENIDDCLGQPCRNGGTCIDEVDAFRCFCPSGWEGELCDTNPNDCLPDPCHSRGRCYDLVNDFYCACDDGWKGKTCHSREFQCDAYTCSNGGTCYDSGDTFRCACPPGWKGSTCAVAKNSSCLPNPCVNGGTCVGSGASFSCICRDGWEGRTCTHNTNDCNPLPCYNGGICVDGVNWFRCECAPGFAGPDCRINIDECQSSPCAYGATCVDEINGYRCSCPPGRAGPRCQEVIGFGRSCWSRGTPFPHGSSWVEDCNSCRCLDGRRDCSKVWCGWKPCLLAGQPEALSAQCPLGQRCLEKAPGQCLRPPCEAWGECGAEEPPSTPCLPRSGHLDNNCARLTLHFNRDHVPQGTTVGAICSGIRSLPATRAVARDRLLVLLCDRASSGASAVEVAVSFSPARDLPDSSLIQGAAHAIVAAITQRGNSSLLLAVTEVKVETVVTGGSSTGLLVPVLCGAFSVLWLACVVLCVWWTRKRRKERERSRLPREESANNQWAPLNPIRNPIERPGGHKDVLYQCKNFTPPPRRADEALPGPAGHAAVREDEEDEDLGRGEEDSLEAEKFLSHKFTKDPGRSPGRPAHWASGPKVDNRAVRSINEARYAGKE

SEQ ID NO: 235 - protein, 1200 aa, Homo sapiens
MRAQGRGRLPRRLLLLLALWVQAARPMGYFELQLSALRNVNGELLSGACCDGDGRTTRAGGCGHDECDTYVRVCLKEYQAKVTPTGPCSYGHGATPVLGGNSFYLPPAGAAGDRARARARAGGDQDPGLVVIPFQFAWPRSFTLIVEAWDWDNDTTPNEELLIERVSHAGMINPEDRWKSLHFSGHVAHLELQIRVRCDENYYSATCNKFCRPRNDFFGHYTCDQYGNKACMDGWMGKECKEAVCKQGCNLLHGGCTVPGECRCSYGWQGRFCDECVPYPGCVHGSCVEPWQCNCETNWGGLLCDKDLNYCGSHHPCTNGGTCINAEPDQYRCTCPDGYSGRNCEKAEHACTSNPCANGGSCHEVPSGFECHCPSGWSGPTCALDIDECASNPCAAGGTCVDQVDGFECICPEQWVGATCQLDVNDCRGQCQHGGTCKDLVNGYQCVCPRGFGGRHCELERDECASSPCHSGGLCEDLADGFHCHCPQGFSGPLCEVDVDLCEPSPCRNGARCYNLEGDYYCACPDDFGGKNCSVPREPCPGGACRVIDGCGSDAGPGMPGTAASGVCGPHGRCVSQPGGNFSCICDSGFTGTYCHENIDDCLGQPCRNGGTCIDEVDAFRCFCPSGWEGELCDTNPNDCLPDPCHSRGRCYDLVNDFYCACDDGWKGKTCHSREFQCDAYTCSNGGTCYDSGDTFRCACPPGWKGSTCAVAKNSSCLPNPCVNGGTCVGSGASFSCICRDGWEGRTCTHNTNDCNPLPCYNGGICVDGVNWFRCECAPGFAGPDCRINIDECQSSPCAYGATCVDEINGYRCSCPPGRAGPRCQEVIGFGRSCWSRGTPFPHGSSWVEDCNSCRCLDGRRDCSKVWCGWKPCLLAGQPEALSAQCPLGQRCLEKAPGQCLRPPCEAWGECGAEEPPSTPCLPRSGHLDNNCARLTLHFNRDHVPQGTTVGAICSGIRSLPATRAVARDRLLVLLCDRASSGASAVEVAVSFSPARDLPDSSLIQGAAHAIVAAITQRGNSSLLLAVTEVKVETVVTGGSSTGLLVPVLCGAFSVLWLACVVLCVWWTRKRRKERERSRLPREESANNQWAPLNPIRNPIERPGGHKDVLYQCKNFTPPPRRADEALPGPAGHAAVREDEEDEDLGRGEEDSLEAEKFLSHKFTKDPGRSPGRPAHWASGPKVDNRAVRSINEARYAGKE

SEQ ID NO: 236 - protein, 1098 aa, Bos taurus
MWTEPVGLSELLPPVFCEKLLIDRVSHAGMINPEDRWKSLHFSGHVAHLELKIRVRCDENYYSPTCNKFCRPRNDFFGHYTCDQYGNKACMDGWMGKECKEAVCKQGCNLLHGGCSVPGECRCSYGWQGRFCDECVPYPGCVHGSCVEPWQCTCETNWGGLLCNKDLNYCGSHHPCANGGTCINAEPDQYRCACPDGYSGKNCERAEHACASNPCANGGSCHEVPSGFECHCPSGWSGPTCALDIDECASNPCAAGGTCVDQVDGFECVCPEQWVGATCQLDANECEGKPCLNAFSCKNLIGGYYCDCLPGWKGANCHINVDDCRGQCQHGGTCKDLVNGYQCVCPRGFGGRHCEHQLDECASSPCHGGLCEDLVDGFRCHCPQGFSGPLCEVDIDLCEPSPCQNGAQCYNLEGDYYCACPDDMGGKNCSEPRAPCPGGACRVVDGCGFEAGTRVAGMGPSGVCGPHGHCISQPGGNFSCVCDSGFTGTYCHENIDDCLGQPCRNGGTCIDEVDAFRCFCPSGWEGELCDTNPNDCLPDPCHSRGRCFDLVNDFYCMCDDGWKGKTCHSREFQCDAYTCSNGGTCYDSGDTFRCACPPGWKGSTCTVAKNSSCLPNPCVNGGTCVGSGDSFSCICRDGWEGRTCTHNTNDCNPLPCYNGGVCVDGVNWFRCECAPGFAGPDCRINIDECQSSPCAYGATCVDEINGYRCSCPPGRSGLRCQEVIVFGRSCWSQGMPFPHGSSWVEDCNSCRCLDGHRDCSKVWCGQKPCLLAGRPDALSTQCPPGQQCLEKAPGQCLQPPCAAWGACSAEEPALPSTPCQPRSGHLDNNCARLTLRFNRDQVPQGTTVGTVCSGIRALPATRAAARDRLLVLLCDRPPSEASAVEVALSFSPARDVPDSTLIQSAAHAIVAAITQRGNSSLLLAVTEVKVETVVVGRSSTGLLVTVLCGVFSVLCLACVVVCVWWMRKRRKERERSRLPREEGPNNQWAPLNPIRNPIERPGGPGGPKDALFPCKNFTPPPRRVGEALPGPAGAGEDEEDEEPGRGEDESPEAEKFLAHKFTKDPGRSPGRPARWASGPKVDNRTLGGVSAARRAGRE

SEQ ID NO: 237 - protein, 1247 aa, Mus musculus
MRARGWGRLPRRLLLLLVLCVQATRPMGYFELQLSALRNVNGELLSGACCDGDGRTTRAGGCGRDECDTYVRVCLKEYQAKVTPTGPCSYGYGATPVLGGNSFYLPPAGAAGDRARARSRTGGHQDPGLVVIPFQFAWPRSFTLIVEAWDWDNDTTPDEELLIERVSHAGMINPEDRWKSLHFSGHVAHLELQIRVRCDENYYSATCNKFCRPRNDFFGHYTCDQYGNKACMDGWMGKECKEAVCKQGCNLLHGGCTVPGECRCSYGWQGKFCDECVPYPGCVHGSCVEPWHCDCETNWGGLLCDKDLNYCGSHHPCVNGGTCINAEPDQYLCACPDGYLGKNCERAEHACASNPCANGGSCHEVPSGFECHCPSGWNGPTCALDIDECASNPCAAGGTCVDQVDGFECICPEQWVGATCQLDANECEGKPCLNAFSCKNLIGGYYCDCLPGWKGINCQININDCHGQCQHGGTCKDLVNGYQCVCPRGFGGRHCELEYDKCASSPCRRGGICEDLVDGFRCHCPRGLSGLHCEVDMDLCEPSPCLNGARCYNLEGDYYCACPEDFGGKNCSVPRDTCPGGACRVIDGCGFEAGSRARGVAPSGICGPHGHCVSLPGGNFSCICDSGFTGTYCHENIDDCMGQPCRNGGTCIDEVDSFRCFCPSGWEGELCDINPNDCLPDPCHSRGRCYDLVNDFYCACDDGWKGKTCHSREFQCDAYTCSNGGTCYDSGDTFRCACPPGWKGSTCTIAKNSSCVPNPCVNGGTCVGSGDSFSCICRDGWEGRTCTHNTNDCNPLPCYNGGICVDGVNWFRCECAPGFAGPDCRINIDECQSSPCAYGATCVDEINGYRCSCPPGRSGPRCQEVVIFTRPCWSRGMSFPHGSSWMEDCNSCRCLDGHRDCSKVWCGWKPCLLSGQPSDPSAQCPPGQQCQEKAVGQCLQPPCENWGECTAEEPLPPSTPCQPRSSHLDNNCARLTLRFNRDQVPQGTTVGAICSGIRALPATRAAAHDRLLLLLCDRASSGASAVEVAVSFSPARDLPDSSLIQSTAHAIVAAITQRGNSSLLLAVTEVKVETVVMGGSSTGLLVPVLCSVFSVLWLACVVICVWWTRKRRKERERSRLPRDESANNQWAPLNPIRNPIERPGGSGLGTGGHKDILYQCKNFTPPPRRAGEALPGPAGHGAGGEDEEDEELSRGDGDSPEAEKFISHKFTKDPSCSLGRPARWAPGPKVDNRAVRSTKDVRRAGRE

SEQ ID NO: 238 - protein, 771 aa, Homo sapiens [sequence omitted]

SEQ ID NO: 239 - protein, 772 aa, Mus musculus
MGWFTGIACLFWGVLLTARANYANGKNNVPRLKLSYKEMLESNNVITFNGLANSSSYHTFLLDEERSRLYVGAKDHIFSFNLVNIKDFQKIVWPVSYTRRDECKWAGKDILKECANFIKVLEAYNQTHLYACGTGAFHPICTYIEVGHHPEDNIFKLQDSHFENGRGKSPYDPKLLTASLLIDGELYSGTAADFMGRDFAIFRTLGHHHPIRTEQHDSRWLNDPRFISAHLIPESDNPEDDKVYFFFRENAIDGEHSGKATHARIGQICKNDFGGHRSLVNKWTTFLKARLICSVPGPNGIDTHFDELQDVFLMNSKDPKNPIVYGVFTTSSNIFKGSAVCMYSMSDVRRVFLGPYAHRDGPNYQWVPYQGRVPYPRPGTCPSKTFGGFDSTKDLPDDVITFARSHPAMYNPVFPINNRPIMIKTDVNYQFTQIVVDRVDAEDGQYDVMFIGTDVGTVLKVVSVPKETWHDLEEVLLEEMTVFREPTTISAMELSTKQQQLYIGSTAGVAQLPLHRCDIYGKACAECCLARDPYCAWDGSSCSRYFPTAKRRTRRQDIRNGDPLTHCSDLQHHDNHHGPSLEERIIYGVENSSTFLECSPKSQRALVYWQFQRRNEDRKEEIRMGDHIIRTEQGLLLRSLQKKDSGNYLCHAVEHGFMQTLLKVTLEVIDTEHLEELLHKDDDGDGSKIKEMSSSMTPSQKVWYRDFMQLINHPNLNTMDEFCEQVWKRDRKQRRQRPGHSQGSSNKWKHMQESKKGRNRRTHEFERAPRSV

SEQ ID NO: 240 - protein, 785 aa, Homo sapiens
MLVAGLLLWASLLTGAWPSFPTQDHLPATPRVRLSFKELKATGTAHFFNFLLNTTDYRILLKDEDHDRMYVGSKDYVLSLDLHDINREPLIIHWAASPQRIEECVLSGKDVNGECGNFVRLIQPWNRTHLYVCGTGAYNPMCTYVNRGRRAQATPWTQTQAVRGRGSRATDGALRPMPTAPRQDYIFYLEPERLESGKGKCPYDPKLDTASALINEELYAGVYIDFMGTDAAIFRTLGKQTAMRTDQYNSRWLNDPSFIHAELIPDSAERNDDKLYFFFRERSAEAPQSPAVYARIGRICLNDDGGHCCLVNKWSTFLKARLVCSVPGEDGIETHFDELQDVFVQQTQDVRNPVIYAVFTSSGSVFRGSAVCVYSMADIRMVFNGPFAHKEGPNYQWMPFSGKMPYPRPGTCPGGTFTPSMKSTKDYPDEVINFMRSHPLMYQAVYPLQRRPLVVRTGAPYRLTTIAVDQVDAADGRYEVLFLGTDRGTVQKVIVLPKDDQELEELMLEEVEVFKDPAPVKTMTISSKRQQLYVASAVGVTHLSLHRCQAYGAACADCCLARDPYCAWDGQACSRYTASSKRRSRRQDVRHGNPIRQCRGFNSNANKNAVESVQYGVAGSAAFLECQPRSPQATVKWLFQRDPGDRRREIRAEDRFLRTEQGLLLRALQLSDRGLYSCTATENNFKHVVTRVQLHVLGRDAVHAALFPPLSMSAPPPPGAGPPTPPYQELAQLLAQPEVGLIHQYCQGYWRHVPPSPREAPGAPRSPEPQDQKKPRNRRHHPPDT

SEQ ID NO: 241 - protein, 754 aa, Mus musculus
MLVTAFILWASLLTGAWPATPIQDQLPATPRVRLSFKELKATGTAHFFNFLLNTTDYRILLKDEDHDRMYVGSKDYVLSLDLHDINREPLIIHWAASPQRIEECILSGKDGNGECGNFVRLIQPWNRTHLYVCGTGAYNPMCTYVNRGRRAQDYIFYLEPEKLESGKGKCPYDPKLDTASALINEELYAGVYIDFMGTDAAIFRTLGKQTAMRTDQYNSRWLNDPSFIHAELIPDSAERNDDKLYFFFRERSAEAPQNPAVYARIGRICLNDDGGHCCLVNKWSTFLKARLVCSVPGEDGIETHFDELQDVFVQQTQDVRNPVIYAVFTSSGSVFRGSAVCVYSMADIRMVFNGPFAHKEGPNYQWMPFSGKMPYPRPGTCPGGTFTPSMKSTKDYPDEVINFMRTHPLMYQAVYPLQRRPLVVRTGAPYRLTTVAVDQVDAADGRYEVLFLGTDRGTVQKVIVLPKDDQEVEELMLEEVEVFKEPAPVKTMTISSKRQQLYVASAVGVTHLSLHRCQAYGAACADCCLARDPYCAWDGQACSRYTASSKRRSRRQDVRHGNPIRQCRGFNSNANKNAVESVQYGVAGSAAFLECQPRSPQATVKWLFQRDPSDRRREIRAEDRFLRTEQGLLLRALQLGDRGLYSCTATENNFKHIVTRVQLHVLGRDAVHAALFPPLAVSVPPPPGTGPPTPPYQELAQLLAQPEVGLIHQYCQGYWRHVPPRPREAPGALRPPELQDQKKPRNRRHHPPDT

SEQ ID NO: 242 - protein, 862 aa, Homo sapiens
MRMCTPIRGLLMALAVMFGTAMAFAPIPRITWEHREVHLVQFHEPDIYNYSALLLSEDKDTLYIGAREAVFAVNALNISEKQHEVYWKVSEDKKAKCAEKGKSKQTECLNYIRVLQPLSATSLYVCGTNAFQPACDHLNLTSFKFLGKNEDGKGRCPFDPAHSYTSVMVDGELYSGTSYNFLGSEPIISRNSSHSPLRTEYAIPWLNEPSFVFADVIRKSPDSPDGEDDRVYFFFTEVSVEYEFVFRVLIPRIARVCKGDQGGLRTLQKKWTSFLKARLICSRPDSGLVFNVLRDVFVLRSPGLKVPVFYALFTPQLNNVGLSAVCAYNLSTAEEVFSHGKYMQSTTVEQSHTKWVRYNGPVPKPRPGACIDSEARAANYTSSLNLPDKTLQFVKDHPLMDDSVTPIDNRPRLIKKDVNYTQIVVDRTQALDGTVYDVMFVSTDRGALHKAISLEHAVHIIEETQLFQDFEPVQTLLLSSKKGNRFVYAGSNSGVVQAPLAFCGKHGTCEDCVLARDPYCAWSPPTATCVALHQTESPSRGLIQEMSGDASVCPDKSKGSYRQHFFKHGGTAELKCSQKSNLARVFWKFQNGVLKAESPKYGLMGRKNLLIFNLSEGDSGVYQCLSEERVKNKTVFQVVAKHVLEVKVVPKPVVAPTLSVVQTEGSRIATKVLVASTQGSSPPTPAVQATSSGAITLPPKPAPTGTSCEPKIVINTVPQLHSEKTMYLKSSDNRLLMSLFLFFFVLFLCLFFYNCYKGYLPRQCLKFRSALLIGKKKPKSDFCDREQSLKETLVEPGSFSQQNGEHPKPALDTGYETEQDTITSKVPTDREDSQRIDDLSARDKPFDVKCELKFADSDADGD

SEQ ID NO: 243 - protein, 738 aa, Homo sapiens
MRMCTPIRGLLMALAVMFGTAMAFAPIPRITWEHREVHLVQFHEPDIYNYSALLLSEDKDTLYIGAREAVFAVNALNISEKQHEVYWKVSEDKKAKCAEKGKSKQTECLNYIRVLQPLSATSLYVCGTNAFQPACDHLNLTSFKFLGKNEDGKGRCPFDPAHSYTSVMVDGELYSGTSYNFLGSEPIISRNSSHSPLRTEYAIPWLNEPSFVFADVIRKSPDSPDGEDDRVYFFFTEVSVEYEFVFRVLIPRIARVCKGDQGGLRTLQKKWTSFLKARLICSRPDSGLVFNVLRDVFVLRSPGLKVPVFYALFTPQLNNVGLSAVCAYNLSTAEEVFSHGKYMQSTTVEQSHTKWVRYNGPVPKPRPGACIDSEARAANYTSSLNLPDKTLQFVKDHPLMDDSVTPIDNRPRLIKKDVNYTQIVVDRTQALDGTVYDVMFVSTDRGALHKAISLEHAVHIIEETQLFQDFEPVQTLLLSSKKGNRFVYAGSNSGVVQAPLAFCGKHGTCEDCVLARDPYCAWSPPTATCVALHQTESPSRGLIQEMSGDASVCPASSPKPLPPPGSSSLSCLGHVGDRRLSSPWTPWPASGAGPDSSSRVSLLPPFLSDQAQHVHALGNFYLFCQATGPADIRFVWEKNGRALETCVPVQTHALPDGRAHALSWLQDAIRESAEYRCSVLSSAGNKTSKVQVAVMRPEVTHQERWTRELSAWRAVAGEHDRMMQSWRKAWESCSKDTL

SEQ ID NO: 244 - protein, 861 aa, Mus musculus
MRMCAPVRGLFLALVVVLRTAVAFAPVPRLTWEHGEVGLVQFHKPGIFNYSALLMSEDKDTLYVGAREAVFAVNALNISEKQHEVYWKVSEDKKSKCAEKGKSKQTECLNYIRVLQPLSSTSLYVCGTNAFQPTCDHLNLTSFKFLGKSEDGKGRCPFDPAHSYTSVMVGGELYSGTSYNFLGSEPIISRNSSHSPLRTEYAIPWLNEPSFVFADVIQKSPDGPEGEDDKVYFFFTEVSVEYEFVFKLMIPRVARVCKGDQGGLRTLQKKWTSFLKARLICSKPDSGLVFNILQDVFVLRAPGLKEPVFYAVFTPQLNNVGLSAVCAYTLATVEAVFSRGKYMQSATVEQSHTKWVRYNGPVPTPRPGACIDSEARAANYTSSLNLPDKTLQFVKDHPLMDDSVTPIDNRPKLIKKDVNYTQIVVDRTQALDGTFYDVMFISTDRGALHKAVILTKEVHVIEETQLFRDSEPVLTLLLSSKKGRKFVYAGSNSGVVQAPLAFCEKHGSCEDCVLARDPYCAWSPAIKACVTLHQEEASSRGWIQDMSGDTSSCLDKSKESFNQHFFKHGGTAELKCFQKSNLARVVWKFQNGELKAASPKYGFVGRKHLLIFNLSDGDSGVYQCLSEERVRNKTVSQLLAKHVLEVKMVPRTPPSPTSEDAQTEGSKITSKMPVASTQGSSPPTPALWATSPRAATLPPKSSSGTSCEPKMVINTVPQLHSEKTVYLKSSDNRLLMSLLLFIFVLFLCLFSYNCYKGYLPGQCLKFRSALLLGKKTPKSDFSDLEQSVKETLVEPGSFSQQNGDHPKPALDTGYETEQDTITSKVPTDREDSQRIDELSARDKPFDVKCELKFADSDADGD

SEQ ID NO: 245 - protein, 1074 aa, Homo sapiens
MKGTCVIAWLFSSLGLWRLAHPEAQGTTQCQRTEHPVISYKEIGPWLREFRAKNAVDFSQLTFDPGQKELVVGARNYLFRLQLEDLSLIQAVEWECDEATKKACYSKGKSKEECQNYIRVLLVGGDRLFTCGTNAFTPVCTNRSLSNLTEIHDQISGMARCPYSPQHNSTALLTAGGELYAATAMDFPGRDPAIYRSLGILPPLRTAQYNSKWLNEPNFVSSYDIGNFTYFFFRENAVEHDCGKTVFSRAARVCKNDIGGRFLLEDTWTTFMKARLNCSRPGEVPFYYNELQSTFFLPELDLIYGIFTTNVNSIAASAVCVFNLSAIAQAFSGPFKYQENSRSAWLPYPNPNPHFQCGTVDQGLYVNLTERNLQDAQKFILMHEVVQPVTTVPSFMEDNSRFSHVAVDVVQGREALVHIIYLATDYGTIKKVRVPLNQTSSSCLLEEIELFPERRREPIRSLQILHSQSVLFVGLREHVVKIPLKRCQFYRTRSTCIGAQDPYCGWDVVMKKCTSLEESLSMTQWEQSISACPTRNLTVDGHFGVWSPWTPCTHTDGSAVGSCLCRTRSCDSPAPQCGGWQCEGPGMEIANCSRNGGWTPWTSWSPCSTTCGIGFQVRQRSCSNPTPRHGGRVCVGQNREERYCNEHLLCPPHMFWTGWGPWERCTAQCGGGIQARRRICENGPDCAGCNVEYQSCNTNPCPELKKTTPWTPWTPVNISDNGGHYEQRFRYTCKARLADPNLLEVGRQRIEMRYCSSDGTSGCSTDGLSGDFLRAGRYSAHTVNGAWSAWTSWSQCSRDCSRGIRNRKRVCNNPEPKYGGMPCLGPSLEYQECNILPCPVDGVWSCWSPWTKCSATCGGGHYMRTRSCSNPAPAYGGDICLGLHTEEALCNTQPCPESWSEWSDWSECEASGVQVRARQCILLFPMGSQCSGNTTESRPCVFDSNFIPEVSVARSSSVEEKRCGEFNMFHMIAVGLSSSILGCLLTLLVYTYCQRYQQQSHDATVIHPVSPAPLNTSITNHINKLDKYDSVEAIKAFNKNNLILEERNKYFNPHLTGKTYSNAYFTDLNNYDEY

SEQ ID NO: 246 - protein, 1074 aa, Mus musculus
MKGACILAWLFSSLGVWRLARPETQDPAKCQRAEHPVVSYKEIGPWLREFRAENAVDFSRLTFDPGQKELVVGARNYLFRLELEDLSLIQAVEWECDEATKKACYSKGKSKEECQNYIRVLLVGGDRLFTCGTNAFTPVCTIRSLSNLTEIHDQISGMARCPYSPQHNSTALLTASGELYAATAMDFPGRDPAIYRSLGTLPPLRTAQYNSKWLNEPNFVSSYDIGNFTYFFFRENAVEHDCGKTVFSRAARVCKNDIGGRFLLEDTWTTFMKARLNCSRPGEVPFYYNELQGTFFLPELDLIYGIFTTNVNSIAASAVCVFNLSAISQAFNGPFKYQENSRSAWLPYPNPNPNFQCGTMDQGLYVNLTERNLQDAQKFILMHEVVQPVTTVPSFMEDNSRFSHLAVDVVQGRETLVHIIYLATDYGTIKKVRAPLSQSSGSCLLEEIELFPERRSEPIRSLQILHSQSVLFVGLQEHVAKIPLKRCHFHQTRSACIGAQDPYCGWDAVMKKCTSLEESLSMTQWDQSIPTCPTRNLTVDGSFGPWSPWTPCTHTDGTAVGSCLCRSRSCDSPAPQCGGWQCEGPRMEITNCSRNGGWTPWTSWSPCSTTCGIGFQVRQRSCSNPTPRHGGRVCVGQNREERYCNEHLLCPPHVFWTGWGPWERCTAQCGGGIQARRRTCENGPDCAGCNVEYQPCNTNACPELKKTTPWTPWTPVNISDNGGHYEQRFRYTCKARLPDPNLLEVGRQRIEMRYCSSDGTSGCSTDGLSGDFLRAGRYSAHTVNGAWSAWTSWSQCSRDCSRGIRNRKRVCNNPEPKFGGMPCLGPSLEFQECNILPCPVDGVWSCWSSWSKCSATCGGGHYMRTRSCSNPAPAYGGDICLGLHTEEALCNTQTCPESWSEWSDWSVCDASGTQVRARQCILLFPVGSQCSGNTTESRPCVFDSNFIPEVSVARSSSVEEKRCGEFNMFHMMAVGLSSSILGCLLTLLVYTYCQRYQQQSHDATVIHPVSPAALNSSITNHINKLDKYDSVEAIKAFNKNNLILEERNKYFNPHLTGKTYSNAYFTDLNNYDEY

SEQ ID NO: 247 - protein, 1170 aa, Homo sapiens
MGLAWGLGVLFLMHVCGTNRIPESGGDNSVFDIFELTGAARKGSGRRLVKGPDPSSPAFRIEDANLIPPVPDDKFQDLVDAVRAEKGFLLLASLRQMKKTRGTLLALERKDHSGQVFSVVSNGKAGTLDLSLTVQGKQHVVSVEEALLATGQWKSITLFVQEDRAQLYIDCEKMENAELDVPIQSVFTRDLASIARLRIAKGGVNDNFQGVLQNVRFVFGTTPEDILRNKGCSSSTSVLLTLDNNVVNGSSPAIRTNYIGHKTKDLQAICGISCDELSSMVLELRGLRTIVTTLQDSIRKVTEENKELANELRRPPLCYHNGVQYRNNEEWTVDSCTECHCQNSVTICKKVSCPIMPCSNATVPDGECCPRCWPSDSADDGWSPWSEWTSCSTSCGNGIQQRGRSCDSLNNRCEGSSVQTRTCHIQECDKRFKQDGGWSHWSPWSSCSVTCGDGVITRIRLCNSPSPQMNGKPCEGEARETKACKKDACPINGGWGPWSPWDICSVTCGGGVQKRSRLCNNPTPQFGGKDCVGDVTENQICNKQDCPIDGCLSNPCFAGVKCTSYPDGSWKCGACPPGYSGNGIQCTDVDECKEVPDACFNHNGEHRCENTDPGYNCLPCPPRFTGSQPFGQGVEHATANKQVCKPRNPCTDGTHDCNKNAKCNYLGHYSDPMYRCECKPGYAGNGIICGEDTDLDGWPNENLVCVANATYHCKKDNCPNLPNSGQEDYDKDGIGDACDDDDDNDKIPDDRDNCPFHYNPAQYDYDRDDVGDRCDNCPYNHNPDQADTDNNGEGDACAADIDGDGILNERDNCQYVYNVDQRDTDMDGVGDQCDNCPLEHNPDQLDSDSDRIGDTCDNNQDIDEDGHQNNLDNCPYVPNANQADHDKDGKGDACDHDDDNDGIPDDKDNCRLVPNPDQKDSDGDGRGDACKDDFDHDSVPDIDDICPENVDISETDFRRFQMIPLDPKGTSQNDPNWVVRHQGKELVQTVNCDPGLAVGYDEFNAVDFSGTFFINTERDDDYAGFVFGYQSSSRFYVVMWKQVTQSYWDTNPTRAQGYSGLSVKVVNSTTGPGEHLRNALWHTGNTPGQVRTLWHDPRHIGWKDFTAYRWRLSHRPKTGFIRVVMYEGKKIMADSGPIYDKTYAGGRLGLFVFSQEMVFFSDLKYECRDP

SEQ ID NO: 248 - protein, 1171 aa, Mus musculus
MELLRGLGVLFLLHMCGSNRIPESGGDNGVFDIFELIGGARRGPGRRLVKGQDLSSPAFRIENANLIPAVPDDKFQDLLDAVWADKGFIFLASLRQMKKTRGTLLAVERKDNTGQIFSVVSNGKAGTLDLSLSLPGKQQVVSVEEALLATGQWKSITLFVQEDRAQLYIDCDKMESAELDVPIQSIFTRDLASVARLRVAKGDVNDNFQGVLQNVRFVFGTTPEDILRNKGCSSSATNVLLTLDNNVVNGSSPAIRTNYIGHKTKDLQAICGLSCDELSSMVLELKGLRTIVTTLQDSIRKVTEENRELVSELKRPPLCFHNGVQYKNNEEWTVDSCTECHCQNSVTICKKVSCPIMPCSNATVPDGECCPRCWPSDSADDGWSPWSEWTSCSATCGNGIQQRGRSCDSLNNRCEGSSVQTRTCHIQECDKRFKQDGGWSHWSPWSSCSVTCGDGVITRIRLCNSPSPQMNGKPCEGEARETKACKKDACPINGGWGPWSPWDICSVTCGGGVQRRSRLCNNPTPQFGGKDCVGDVTENQVCNKQDCPIDGCLSNPCFAGAKCTSYPDGSWKCGACPPGYSGNGIQCKDVDECKEVPDACFNHNGEHRCKNTDPGYNCLPCPPRFTGSQPFGRGVEHAMANKQVCKPRNPCTDGTHDCNKNAKCNYLGHYSDPMYRCECKPGYAGNGIICGEDTDLDGWPNENLVCVANATYHCKKDNCPNLPNSGQEDYDKDGIGDACDDDDDNDKIPDDRDNCPFHYNPAQYDYDRDDVGDRCDNCPYNHNPDQADTDKNGEGDACAVDIDGDGILNERDNCQYVYNVDQRDTDMDGVGDQCDNCPLEHNPDQLDSDSDLIGDTCDNNQDIDEDGHQNNLDNCPYVPNANQADHDKDGKGDACDHDDDNDGIPDDRDNCRLVPNPDQKDSDGDGRGDACKDDFDHDNVPDIDDICPENFDISETDFRQFQMIPLDPKGTSQNDPNWVVRHQGKELVQTVNCDPGLAVGYDEFNAVDFSGTFFINTERDDDYAGFVFGYQSSSRFYVVMWKQVTQSYWDTNPTRAQGYSGLSVKVVNSTTGPGEHLRNALWHTGNTPGQVRTLWHDPRHIGWKDFTAYRWRLSHRPKTGYIRVVMYEGKKIMADSGPIYDKTYAGGRLGLFVFSQEMVFFSDMKYECRDS

SEQ ID NO: 249 - protein, 1172 aa, Homo sapiens
MVWRLVLLALWVWPSTQAGHQDKDTTFDLFSISNINRKTIGAKQFRGPDPGVPAYRFVRFDYIPPVNADDLSKITKIMRQKEGFFLTAQLKQDGKSRGTLLALEGPGLSQRQFEIVSNGPADTLDLTYWIDGTRHVVSLEDVGLADSQWKNVTVQVAGETYSLHVGCDLIGPVALDEPFYEHLQAEKSRMYVAKGSARESHFRGLLQNVHLVFENSVEDILSKKGCQQGQGAEINAISENTETLRLGPHVTTEYVGPSSERRPEVCERSCEELGNMVQELSGLHVLVNQLSENLKRVSNDNQFLWELIGGPPKTRNMSACWQDGRFFAENETWVVDSCTTCTCKKFKTICHQITCPPATCASPSFVEGECCPSCLHSVDGEEGWSPWAEWTQCSVTCGSGTQQRGRSCDVTSNTCLGPSIQTRACSLSKCDTRIRQDGGWSHWSPWSSCSVTCGVGNITRIRLCNSPVPQMGGKNCKGSGRETKACQGAPCPIDGRWSPWSPWSACTVTCAGGIRERTRVCNSPEPQYGGKACVGDVQERQMCNKRSCPVDGCLSNPCFPGAQCSSFPDGSWSCGFCPVGFLGNGTHCEDLDECALVPDICFSTSKVPRCVNTQPGFHCLPCPPRYRGNQPVGVGLEAAKTEKQVCEPENPCKDKTHNCHKHAECIYLGHFSDPMYKCECQTGYAGDGLICGEDSDLDGWPNLNLVCATNATYHCIKDNCPHLPNSGQEDFDKDGIGDACDDDDDNDGVTDEKDNCQLLFNPRQADYDKDEVGDRCDNCPYVHNPAQIDTDNNGEGDACSVDIDGDDVFNERDNCPYVYNTDQRDTDGDGVGDHCDNCPLVHNPDQTDVDNDLVGDQCDNNEDIDDDGHQNNQDNCPYISNANQADHDRDGQGDACDPDDDNDGVPDDRDNCRLVFNPDQEDLDGDGRGDICKDDFDNDNIPDIDDVCPENNAISETDFRNFQMVPLDPKGTTQIDPNWVIRHQGKELVQTANSDPGIAVGFDEFGSVDFSGTFYVNTDRDDDYAGFVFGYQSSSRFYVVMWKQVTQTYWEDQPTRAYGYSGVSLKVVNSTTGTGEHLRNALWHTGNTPGQVRTLWHDPRNIGWKDYTAYRWHLTHRPKTGYIRVLVHEGKQVMADSGPIYDQTYAGGRLGLFVFSQEMVYFSDLKYECRDI

SEQ ID NO: 250 - protein, 1172 aa, Mus musculus
MLWALALLALGIGPRASAGDHVKDTSFDLFSISNINRKTIGAKQFRGPDPGVPAYRFVRFDYIPPVNTDDLNRIVKLARRKEGFFLTAQLKQDRKSRGTLLVLEGPGTSQRQFEIVSNGPGDTLDLNYWVEGNQHTNFLEDVGLADSQWKNVTVQVASDTYSLYVGCDLIDSVTLEEPFYEQLEVDRSRMYVAKGASRESHFRGLLQNVHLVFADSVEDILSKKGCQHSQGAEVNTISEHTETLHLSPHITTDLVVQGVEKAQEVCTHSCEELSNMMNELSGLHVMVNQLSKNLERVSSDNQFLLELIGGPLKTRNMSACVQEGRIFAENETWVVDSCTTCTCKKFKTVCHQITCSPATCANPSFVEGECCPSCSHSADSDEGWSPWAEWTECSVTCGSGTQQRGRSCDVTSNTCLGPSIQTRTCSLGKCDTRIRQNGGWSHWSPWSSCSVTCGVGNVTRIRLCNSPVPQMGGKNCKGSGRETKPCQRDPCPIDGRWSPWSPWSACTVTCAGGIRERSRVCNSPEPQYGGKDCVGDVTEHQMCNKRSCPIDGCLSNPCFPGAKCNSFPDGSWSCGSCPVGFLGNGTHCEDLDECAVVTDICFSTNKAPRCVNTNPGFHCLPCPPRYKGNQPFGVGLEDARTEKQVCEPENPCKDKTHSCHKNAECIYLGHFSDPMYKCECQIGYAGDGLICGEDSDLDGWPNNNLVCATNATYHCIKDNCPKLPNSGQEDFDKDGIGDACDEDDDNDGVSDEKDNCQLLFNPRQLDYDKDEVGDRCDNCPYVHNPAQIDTDNNGEGDACSVDIDGDDVFNERDNCPYVYNTDQRDTDGDGVGDHCDNCPLMHNPDQIDQDNDLVGDQCDNNEDIDDDGHQNNQDNCPYISNSNQADHDNDGKGDACDSDDDNDGVPDDRDNCRLVFNPDQEDSDGDGRGDICKDDFDNDNVPDIDDVCPENNAITETDFRNFQMVPLDPKGTTQIDPNWVIRHQGKELVQTANSDPGIAVGFDEFGSVDFSGTFYVNTDRDDDYAGFVFGYQSSSRFYVVMWKQVTQTYWEDKPSRAYGYSGVSLKVVNSTTGTGEHLRNALWHTGNTEGQVRTLWHDPKNIGWKDYTAYRWHLIHRPKTGYMRVLVHEGKQVMADSGPIYDQTYAGGRLGLFVFSQEMVYFSDLKYECRDA

SEQ ID NO: 251 - protein, 334 aa, Homo sapiens
MTENSDKVPIALVGPDDVEFCSPPAYATLTVKPSSPARLLKVGAVVLISGAVLLLFGAIGAFYFWKGSDSHIYNVHYTMSINGKLQDGSMEIDAGNNLETFKMGSGAEEAIAVNDFQNGITGIRFAGGEKCYIKAQVKARIPEVGAVTKQSISSKLEGKIMPVKYEENSLIWVAVDQPVKDNSFLSSKVLELCGDLPIFWLKPTYPKEIQRERREVVRKIVPTTTKRPHSGPRSNPGAGRLNNETRPSVQEDSQAFNPDNPYHQQEGESMTFDPRLDHEGICCIECRRSYTHCQKICEPLGGYYPWPYNYQGCRSACRVIMPCSWWVARILGMV

SEQ ID NO: 252 - protein, 335 aa, Bos taurus
MTENSDKVPIALVGPDDVEFCSPPAYAAVTVKPSSPARLLKVGAVVLISGAVLLLLGAIGAFYFWKGSDNHIYNVHYTMSINGKLQDGSMEIDAGNNLETFKMGSGAEEAVEVNDFQNGITGIRFAGGEKCYIKAQVKARIPEVGTMTKQSISSELEGKIMPVKYEENSLIWVAGDQPVKDNSFLSSKVLELCGDLPIFWLKPTYPKEIQRERRELVRKIVTTTTTRRLRSGPQGTPAPGRPNNGTRPSVQEDAEPFNPDNPYHQQEGESMTFDPRLDHEGICCIECRRSYTHCQKICEPLGGYHPWPYNYQGCRSACRVIMPCSWWVARILGMV

SEQ ID NO: 253 - protein, 334 aa, Mus musculus
MTENSDKVPITMVGPEDVEFCSPPAYTTVTVKPSGSPTRLLKVGAVVLISGAVLLLFGAIGAFYFWKGNDNHIYNVHYSMSINGKLQDGSMEIDAVNNLETFKMGSGAEEAIEVNDFKNGITGIRFAGGEKCYIKAQVKARIPEVGTVTKQSISELEGKIMPANYEENSLIWVAVDQPVKDSSFLSSKILELCGDLPIFWLKPMYPKEIQRERREVVRNSAPSTTRRPHSEPRGNAGPGRLSNGTRPNVQDDAEPFNPDNPYHQQEGESMTFDPRLDHEGICCIECRRSYTHCQKICEPLGGYYPWPYNYQGCRSACRVVMPCSWWVARILGMV

SEQ ID NO: 254 - protein, 770 aa, Homo sapiens
MLPGLALLLLAAWTARALEVPTDGNAGLLAEPQIAMFCGRLNMHMNVQNGKWDSDPSGTKTCIDTKEGILQYCQEVYPELQITNVVEANQPVTIQNWCKRGRKQCKTHPHFVIPYRCLVGEFVSDALLVPDKCKFLHQERMDVCETHLHWHTVAKETCSEKSTNLHDYGMLLPCGIDKFRGVEFVCCPLAEESDNVDSADAEEDDSDVWWGGADTDYADGSEDKVVEVAEEEEVAEVEEEEADDDEDDEDGDEVEEEAEEPYEEATERTTSIATTTTTTTESVEEVVREVCSEQAETGPCRAMISRWYFDVTEGKCAPFFYGGCGGNRNNFDTEEYCMAVCGSAMSQSLLKTTQEPLARDPVKLPTTAASTPDAVDKYLETPGDENEHAHFQKAKERLEAKHRERMSQVMREWEEAERQAKNLPKADKKAVIQHFQEKVESLEQEAANERQQLVETHMARVEAMLNDRRRLALENYITALQAVPPRPRHVFNMLKKYVRAEQKDRQHTLKHFEHVRMVDPKKAAQIRSQVMTHLRVIYERMNQSLSLLYNVPAVAEEIQDEVDELLQKEQNYSDDVLANMISEPRISYGNDALMPSLTETKTTVELLPVNGEFSLDDLQPWHSFGADSVPANTENEVEPVDARPAADRGLTTRPGSGLTNIKTEEISEVKMDAEFRHDSGYEVHHQKLVFFAEDVGSNKGAIIGLMVGGVVIATVIVITLVMLKKKQYTSIHHGVVEVDAAVTPEERHLSKMQQNGYENPTYKFFEQMQN

SEQ ID NO: 255 - protein, 144 aa, Homo sapiens
MWLQSLLLLGTVACSISAPARSPSPSTQPWEHVNAIQEARRLLNLSRDTAAEMNETVEVISEMFDLQEPTCLQTRLELYKQGLRGSLTKLKGPLTMMASHYKQHCPPTPETSCATQIITFESFKENLKDFLLVIPFDCWEPVQE

SEQ ID NO: 256 - protein, 144 aa, Macaca mulatta
MWLQGLLLLGTVACSISAPARSPSPGTQPWEHVNAIQEARRLLNLSRDTAAEMNKTVEVVSEMFDLQEPSCLQTRLELYKQGLQGSLTKLKGPLTMMASHYKQHCPPTPETSCATQIITFQSFKENLKDFLLVIPFDCWEPVQE

SEQ ID NO: 257 - protein, 143 aa, Bos taurus
MWLQNLLLLGTVVCSFSAPTRPPNTATRPWQHVDAIKEALSLLNHSSDTDAVMNDTEVVSEKFDSQEPTCLQTRLKLYKNGLQGSLTSLMGSLTMMATHYEKHCPPTPETSCGTQFISFKNFKEDLKEFLFIIPFDCWEPAQK

SEQ ID NO: 258 - protein, 144 aa, Sus scrofa
MWLQNLLLLGTVVCSISAPTRPPSPVTRPWQHVDAIKEALSLLNNSNDTAAVMNETVDVVCEMFDPQEPTCVQTRLNLYKQGLRGSLTRLKSPLTLLAKHYEQHCPLTEETSCETQSITFKSFKDSLNKFLFTIPFDCWGPVKK

SEQ ID NO: 259 - protein, 141 aa, Mus musculus
MWLQNLLFLGIVVYSLSAPTRSPITVTRPWKHVEAIKEALNLLDDMPVTLNEEVEVVSNEFSFKKLTCVQTRLKIFEQGLRGNFTKLKGALNMTASYYQTYCPPTPETDCETQVTTYADFIDSLKTFLTDIPFECKKPGQK

SEQ ID NO: 260 - protein, 144 aa, Rattus norvegicus
MWLQNLLFLGIVVYSFSAPTRSPNPVTRPWKHVDAIKEALSLLNDMRALENEKNEDVDIISNEFSIQRPTCVQTRLKLYKQGLRGNLTKLNGALTMIASHYQTNCPPTPETDCEIEVTTFEDFIKNLKGFLFDIPFDCWKPVQK

SEQ ID NO: 261 - protein, 144 aa, Gallus gallus
MLAQLTILLALGVLCSPAPTTTYSCCYKVYTILEEITSHLESTAATAGLSSVPMDIRDKTCLRNNLKTFIESLKTNGTEEESGIVFQLNRVHECERLFSNITPTPQVPDKECRTAQVSREKFKEALKTFFIYLSDVLPEEKDCI

SEQ ID NO: 262 - protein, 195 aa, Homo sapiens [sequence omitted]

SEQ ID NO: 263 - protein, 189 aa, Homo sapiens
MALTFYLLVALVVLSYKSFSSLGCDLPQTHSLGNRRALILLAQMRRISPFSCLKDRHDFEFPQEEFDDKQFQKAQAISVLHEMIQQTFNLFSTKDSSAALDETLLDEFYIELDQQLNDLESCVMQEVGVIESPLMYEDSILAVRKYFQRITLYLTEKKYSSCAWEVVRAEIMRSFSLSINLQKRLKSKE

SEQ ID NO: 264 - protein, 189 aa, Macaca mulatta
MALPFALLMALVVLSCKSSCSLGCDLPETHSLDNRRTMMLLKQMSRISPSSCLMDRHDFGFPQQEFDGNQFQKAPAISVLHELIQQTFNLFTTKDSSAAWGEDLLDKFCAELYQQLNDLEACVMQQERVGETPLMNADSTLAVKKYFRRITLYLTEKKYSPCAWEVIRAEIMRSFSLSTNLQERLRRKE

SEQ ID NO: 265 - protein, 195 aa, Bos taurus
MAFVLSLLMALVLVSYGPGRSLGCYLSEDHMLGARENLRLLARMNRLSPHPCLQDRKDFGLPQEMVEGNQLQKDQAISVLHEMLQQCFNLFYTEHSSAAWNTTLLEQLCTGLQQQLEDLDACLGPVMGEKDSDMGRMGPILTVKKYFQGIHVYLKEKEYSDCAWEIIRVEMMRALSSSTTLQKRLRKMGGDLNSL

SEQ ID NO: 266 - protein, 189 aa, Bos taurus
MAPAWSLLLALLLLSCNAICSLGCHLPHSHSLAKRRVLTLLRQLRRVSPSSCLQDRNDFAFPQEALGGSQLQKAQAISVLHEVTQHTFQLFSTEGSAAVWDESLLDRLRTALDQQLTDLQACLRQEEGLPGAPLLKEDSSLAVRKYFHRLTLYLQEKRHSPCAWEVVRAQVMRAFSSSTNLQERFRRKD

SEQ ID NO: 267 - protein, 166 aa, Sus scrofa
CDLPQIHSLAHTRALRLLAQMRRISPFSCLDHRRDFGSPHEAFGGNQVQKAQAMALVHEMLQQTFQLFSTEGSAAAWNESLLHQFCTGLDQQLRDLEACVMQEAGLEGTPLLEEDSILAVRKYFHRLTLYLQEKSYSPCAWEIVRAEVMRSFSSSRNLQDRLRKKE

SEQ ID NO: 268 - protein, 190 aa, Mus musculus
MARPFAFLMVLVVISYWSTCSLGCDLPQTHNLRNKKILTLLAQMRRLSPLSCLKDRKDFGFPQEKVDAQQIQEAQAIPVLSELTQQILTLFTSKDSSAAWNATLLDSFCTGLHQLLNDLQGCLMQLVGMKELPLTQEDSQLAMKKYFHRITVYLREKKHSPCAWEVVRAEVWRALSSSVNLLARLSEEKE

SEQ ID NO: 269 - protein, 192 aa, Rattus norvegicus
MARLCAFLMSLVVVSYWSACCLGCDLPHTHNLRNKRVFTLLAQMRRLSPVSCLKDRKYFGFPLEKVDGQQIQKAQAIPVLHELTQQILSLFTSKESSTAWDATLLDSFCNDLQQQLSGLQACLMQQVGVQESPLTQEDSLLAVREYFHRITVYLRENKHSPCAWEVVKAEVWRALSSSANLMGRLREERNES

SEQ ID NO: 270 - protein, 193 aa, Gallus gallus
MAVPASPQHPRGYGILLLTLLLKALATTASACNHLRPQDATFSHDSLQLLRDMAPTLPQLCPQHNASCSFNDTILDTSNTRQADKTTHDILQHLFKILSSPSTPAHWNDSQRQSLLNRIHRYTQHLEQCLDSSDTRSRTRWPRNLHLTIKKHFSCLHTFLQDNDYSACAWEHVRLQARAWFLHIHNLTGNTRT

SEQ ID NO: 271 - protein, 418 aa, Homo sapiens
MQALVLLLCIGALLGHSSCQNPASPPEEGSPDPDSTGALVEEEDPFFKVPVNKLAAAVSNFGYDLYRVRSSTSPTTNVLLSPLSVATALSALSLGAEQRTESIIHRALYYDLISSPDIHGTYKELLDTVTAPQKNLKSASRIVFEKKLRIKSSFVAPLEKSYGTRPRVLTGNPRLDLQEINNWVQAQMKGKLARSTKEIPDEISILLLGVAHFKGQWVTKFDSRKTSLEDFYLDEERTVRVPMMSDPKAVLRYGLDSDLSCKIAQLPLTGSMSIIFFLPLKVTQNLTLIEESLTSEFIHDIDRELKTVQAVLTVPKLKLSYEGEVTKSLQEMKLQSLFDSPDFSKITGKPIKLTQVEHRAGFEWNEDGAGTTPSPGLQPAHLTFPLDYHLNQPFIFVLRDTDTGALLFIGKILDPRGP

SEQ ID NO: 272 - protein, 413 aa, Sus scrofa
MQALVLLLWTGALLGSGSCQNAGPEEGSPAPDTVGAPVEEEDPFFKVPVNKLAAAVSNFGYDLYRVRSSESPTANVLLSPLSVATALSALSLGAEQRTESSLHRALYYDLISNPDLHGTYKELLAAVTAPQKNLKSASRIIFEKKLRIKASFVAPLEKSYGTRPRILTGNSRLDLQEVNNWVQAQTKGKVARSTRELPGEISILLLGVAYFKGQWVTKFDSRKTSLEDFHLDEERTVKVPMMSDPKAVLRYGLDSDLNCKIAQLPLTGSMSIIFFLPLKVTQNLTMIEESLTSEFIHDIDRELKTVQAVLTVPKLKLSYEGELTKSVQELKLQSLFDSPDFSKITGKPIKLTQVEHRIGFEWNEDGGSATSSPGPRLTFPLDYHLNQPFIFVLRDTDTGALLFIGKILDPRST

SEQ ID NO: 273 - protein, 417 aa, Mus musculus
MQALVLLLWTGALLGHGSSQNVPSSSEGSPVPDSTGEPVEEEDPFFKVPVNKLAAAVSNFGYDLYRLRSSASPTGNVLLSPLSVATALSALSLGAEHRTESVIHRALYYDLITNPDIHSTYKELLASVTAPEKNLKSASRIVFERKLRVKSSFVAPLEKSYGTRPRILTGNPRVDLQEINNWVQAQMKGKIARSTREMPSALSILLLGVAYFKGQWVTKFDSRKTTLQDFHLDEDRTVRVPMMSDPKAILRYGLDSDLNCKIAQLPLTGSMSIIFFLPLTVTQNLTMIEESLTSEFIHDIDRELKTIQAVLTVPKLKLSFEGELTKSLQDMKLQSLFESPDFSKITGKPVKLTQVEHRAAFEWNEEGAGSSPSPGLQPVRLTFPLDYHLNQPFLFVLRDTDTGALLFIGRILDPSST

SEQ ID NO: 274 - protein, 187 aa, Homo sapiens
MPEVERKPKITASRKLLLKSLMLAKAKECWEQEHEEREAEKVRYLAERIPTLQTRGLSLSALQDLCRELHAKVEVVDEERYDIEAKCLHNTREIKDLKLKVMDLRGKFKRPPLRRVRVSADAMLRALLGSKHKVSMDLRANLKSVKKEDTEKERPVEVGDWRKNVEAMSGMEGRKKMFDAAKSPTSQ

SEQ ID NO: 275 - protein, 182 aa, Homo sapiens
MGDEEKRNRAITARRQHLKSVMLQIAATELEKEESRREAEKQNYLAEHCPPLHIPGSMSEVQELCKQLHAKIDAAEEEKYDMEVRVQKTSKELEDMNQKLFDLRGKFKRPPLRRVRMSADAMLKALLGSKHKVCMDLRANLKQVKKEDTEKERDLRDVGDWRKNIEEKSGMEGRKKMFESES

SEQ ID NO: 276 - protein, 210 aa, Homo sapiens
MADGSSDAAREPRPAPAPIRRRSSNYRAYATEPHAKKKSKISASRKLQLKTLLLQIAKQELEREAEERRGEKGRALSTRCQPLELAGLGFAELQDLCRQLHARVDKVDEERYDIEAKVTKNITEIADLTQKIFDLRGKFKRPTLRRVRISADAMMQALLGARAKESLDLRAHLKQVKKEDTEKENREVGDWRKNIDALSGMEGRKKKFES

SEQ ID NO: 277 - protein, 365 aa, Homo sapiens
MPGGKKVAGGGSSGATPTSAAATAPSGVRRLETSEGTSAQRDEEPEEEGEEDLRDGGVPFFVNRGGLPVDEATWERMWKHVAKIHPDGEKVAQRIRGATDLPKIPIPSVPTFQPSTPVPERLEAVQRYIRELQYNHTGTQFFEIKKSRPLTGLMDLAKEMTKEALPIKCLEAVILGIYLTNSMPTLERFPISFKTYFSGNYFRHIVLGVNFAGRYGALGMSRREDLMYKPPAFRTLSELVLDFEAAYGRCWHVLKKVKLGQSVSHDPHSVEQIEWKHSVLDVERLGRDDFRKELERHARDMRLKIGKGTGPPSPTKDRKKDVSSPQRAQSSPHRRNSRSERRPSGDKKTSEPKAMPDLNGYQIRV

SEQ ID NO: 278 - protein, 363 aa, Bos taurus
MPGGKKVVGGGSTGAAPTAAAVPSGVRRLETSEGASAQRDDEPEEEGEEDLRDGGIPFFVNRGGLPVDEPTWERMWKHVAKIHPDGEKVAQRIRGATDLPKIPIPSVPTFQPSTPVPERLEAVQRYIRELQYNHTGTQFFEIKKSRPLTGLMDLAKEMTKEALPIKCLEAVILGIYLTNSMPTLERFPISFKTYFSGNYFRHIVLGVNFGGRYGALGMSRREDLMYKPPAFRTLSELVLDYEAAYGRCWHVLKKVKLGQCVSHDPHSVEQIEWKHSVLDVERLGREDFRKELERHARDMRLKIGKGTGPPSPTKDRKKDVSSPQRGQSSPHRRNSRSERRPSGEKKPSEPKAMPDLNGYQIRV

SEQ ID NO: 279 - protein, 375 aa, Mus musculus
MPGGKKVVPSGSSSASPNAAATTTAAAAAAAAAPHSGTKRLETTEGASAQRDEEPEEEGEEDLRDGGVPFFINRGGLPVDEATWERMWKHVAKIHPDGEKVALRIRGATDLPKIPIPSVPTFQPTTPVPERLEAVQRYIRELQYNHTGTQFFEIKKSRPLTGLMDLAKEMTKEALPIKCLEAVILGIYLTNSMPTLERFPISFKTYFSGNYFRHIVLGVNFGGRYGALGMSRREDLMYKPPAFRTLSELVLDYEAAYGRCWHVLKKVKLGQCVSHDPHSVEQIEWKHSVLDVERLGREDFRKELERHARDMRLKIGKGTGPPSPTKDRKKDVSSPQRAQSSPHRRNSRSERRPSGEKKPAEPKAMPDLSGYQIRV

SEQ ID NO: 280 - protein, 311 aa, Homo sapiens
MTGSAADTHRCPHPKGAKGTRSRSSHARPVSLATSGGSEEEDKDGGVLFHVNKSGFPIDSHTWERMWMHVAKVHPKGGEMVGAIRNAAFLAKPSIPQVPNYRLSMTIPDWLQAIQNYMKTLHYLTNGQPSIERFPISFKTYFSGNYFHHVVLGIYCNGRYGSLGMSRRAELMDKPLTFRTLSDLIFDFEDSYKKYLHTVKKVKIGLYVPHEPHSFQPIEWKQLVLNVSKMLRADIRKELEKYARDMRMKILKPASAHSPTQVRSRGKSLSPRRRQASPPRRLGRREKSPALPEKKVADLSTLNEVGYQIRI

SEQ ID NO: 281 - protein, 290 aa, Homo sapiens
MWMHVAKVHPKGGEMVGAIRNAAFLAKPSIPQVPNYRLSMTIPDWLQAIQNYMKTLQYNHTGTQFFEIRKMRPLSGLMETAKEMTRESLPIKCLEAVILGIYLTNGQPSIERFPISFKTYFSGNYFHHVVLGIYCNGRYGSLGMSRRAELMDKPLTFRTLSDLIFDFEDSYKKYLHTVKKVKIGLYVPHEPHSFQPIEWKQLVLNVSKMLRADIRKELEKYARDMRMKILKPASAHSPTQVRSRGKSLSPRRRQASPPRRLGRREKSPALPEKKVADLSTLNEVGYQIRI

SEQ ID NO: 282 - protein, 251 aa, Homo sapiens
MTIPDWLQAIQNYMKTLQYNHTGTQFFEIRKMRPLSGLMETAKEMTRESLPIKCLEAVILGIYLTNGQPSIERFPISFKTYFSGNYFHHVVLGIYCNGRYGSLGMSRRAELMDKPLTFRTLSDLIFDFEDSYKKYLHTVKKVKIGLYVPHEPHSFQPIEWKQLVLNVSKMLRADIRKELEKYARDMRMKILKPASAHSPTQVRSRGKSLSPRRRQASPPRRLGRREKSPALPEKKVADLSTLNEVGYQIRI

SEQ ID NO: 283 - protein, 355 aa, Mus musculus
MTGSAADTHRCPHPKITKGTRSRSSHARPVSLATSGGSEEEDKDGGVLFHVNKSGFPIDSHTWERMWLHVAKVHPRGGEMVGAIRNAAFLAKPSIPQVPNYRLSMTIPDWLQAIQNYMKTLQYNHTGTQFFEIRKMRPLSGLMETAKEMTRESLPIKCLEAVILGIYLTNGQPSIERFPISFKTYFSGNYFHHVVLGIYCNGYYGSLGMSRRAELMDKPLTFRTLSDLVFDFEDSYKKYLHTVKKVKIGLYVPHEPHSFQPIEWKQLVLNVSKMLRADIRKELEKYARDMRMKILKPASAHSPTQVRSRGKSLSPRRRQASPPRRLGRRDKSPALTEKKVADLGTLNEVGYQIRI

SEQ ID NO: 284 - protein, 112 aa, Homo sapiens
MTRCALLLLMVLMLGRVLVVPVTPIPTFQLRPQNSPQTTPRPAASESPSAAPTWPWAAQSHCSPTRHPGSRIVLSLDVPIGLLQILLEQARARAAREQATTNARILARVGHC

SEQ ID NO: 285 - protein, 112 aa, Bos taurus
MTRWALLTLMVLTLGRTLLVPATPTPGFQLLPQNFPQATACPVTSESPSGSTTAPSAAWGRPSPDPHPGPRITLSLDVPLGLLQILLEQARARAVREQAAANARILAQVGRR

SEQ ID NO: 286 - protein, 123 aa, Mus musculus
MDRVPFCCLLFIGLLNPLLSLPVTDTGERTLQLPVLEEDALRALEELERMALLQTLRQTMGTEAGESPGEAGPSTETPTPRGSMRKAFAGQNSNTVLSRLLARTRKQHKQHGAAPECFWKYCI

SEQ ID NO: 287 - protein, 114 aa, Homo sapiens
MRLLILALLGICSLTAYIVEGVGSEVSDKRTCVSLTTQRLPVSRIKTYTITEGSLRAVIFITKRGLKVCADPQATWVRDVVRSMDRKSNTRNNMIQTKPTGTQQSTNTAVTLTG

SEQ ID NO: 288 - protein, 114 aa, Macaca mulatta
MRLLILALLGICCLTAYIVEGVGSEVSDKSTCVSLTTQRLPVNRIKTYTIKEGSLKAVIFITKRGLKVCADPQARWVKDVVKSMDRKSNTRNNMIQTKPTGTQQSTNTAVTLTG

SEQ ID NO: 289 - protein, 97 aa, Bos taurus
MKLLILTCLVICSLAAYTVEGVGSEVLEKSICVSLTTQRLPIKNIKTYTIKEGSVKAVIFITRRGFKICADPQAAWVKKAVQKIDRKNISQAKPTGA

SEQ ID NO: 290 - protein, 110 aa, Sus scrofa
MRLLILAFLVICCLTAYTVEAVGSEVLEKSICVSLTTRRLPVKNIKTYTIKEGSMRAVIFITRRGLKVCADPHVEWVKKAVQTIDKSNRGNQAKPTGAQQTTNTAVTLTG

SEQ ID NO: 291 - protein, 114 aa, Mus musculus
MRLLLLTFLGVCCLTPWVVEGVGTEVLEESSCVNLQTQRLPVQKIKTYIIWEGAMRAVIFVTKRGLKICADPEAKWVKAAIKTVDGRASTRKNMAETVPTGAQRSTSTAITLTG

SEQ ID NO: 292 - protein, 114 aa, Rattus norvegicus
MRLLLLTFLGVCCFAAWVVEGVGTEVLQESICVSLRTQRLPVQKIKTYTIKEGAMRAVIFVTKRGLRICADPQAKWVKTAIKTVDGRASASKSKAETIPTQAQRSASTAVTLTG

SEQ ID NO: 293 - protein, 97 aa, Gallus gallus
MKLHATVLLVIVWLGVFALHTAEGSVASQSMRKLSCVNLSTQKVDIRSIVNYEKQKVPVEAVMFITANGIRICVHPEQKWVQSAMKRIDRRRTTRRR

SEQ ID NO: 294 - protein, 96 aa, Homo sapiens
MQIITTALVCLLLAGMWPEDVDSKSMQVPFSRCCFSFAEQEIPLRAILCYRNTSSICSNEGLIFKLKRGKEACALDTVGWVQRHRKMLRHCPSKRK

SEQ ID NO: 295 - protein, 92 aa, Mus musculus
MKPTAMALMCLLLAAVWIQDVDSKSMLTVSNSCCLNTLKKELPLKFIQCYRKMGSSCPDPPAVVFRLNKGRESCASTNKTWVQNHLKKVNPC

SEQ ID NO: 296 - protein, 99 aa, Homo sapiens
MKVSAALLCLLLIAATFIPQGLAQPDAINAPVTCCYNFTNRKISVQRLASYRRITSSKCPKEAVIFKTIVAKEICADPKQKWVQDSMDHLDKQTQTPKT

SEQ ID NO: 297 - protein, 148 aa, Mus musculus
MQVPVMLLGLLFTVAGWSIHVLAQPDAVNAPLTCCYSFTSKMIPMSRLESYKRITSSRCPKEAVVFVTKLKREVCADPKKEWVQTYIKNLDRNQMRSEPTTLFKTASALRSSAPLNVKLTRKSEANASTTFSTTTSSTSVGVTSVTVN

SEQ ID NO: 298 - protein, 107 aa, Homo sapiens
MARAALSAAPSNPRLLRVALLLLLLVAAGRRAAGASVATELRCQCLQTLQGIHPKNIQSVNVKSPGPHCAQTEVIATLKNGRKACLNPASPIVKKIIEKMLNSDKSN

SEQ ID NO: 299 - protein, 107 aa, Macaca mulatta
MARAALSAAPSNPRFLQVALLLLLLVATGRRAAGASVVTELRCQCLQTLQGIHPKNIQSVNVKAPGPHCAETEVIATLKNGQKACLNPASPMVQKIIKKMLNCDKSN

SEQ ID NO: 300 - protein, 104 aa, Bos taurus
MAPAATAAAPRLLRAAMLFLLLVAAGRRAAGAPVVNELRCQCLQTLQGIHLKNIQSVKVTTPGPHCDQTEVIASLKTGQEVCLNPTAPMVKKIIDKMLNKASAN

SEQ ID NO: 301 - protein, 96 aa, Mus musculus
MIPATRSLLCAALLLLATSRLATGAPIANELRCQCLQTMAGIHLKNIQSLKVLPSGPHCTQTEVIATLKNGREACLDPEAPLVQKIVQKMLKGVPK

SEQ ID NO: 302 - protein, 96 aa, Rattus norvegicus
MVSATRSLLCAALPVLATSRQATGAPVANELRCQCLQTVAGIHFKNIQSLKVMPPGPHCTQTEVIATLKNGREACLDPEAPMVQKIVQKMLKGVPK

SEQ ID NO: 303 - protein, 107 aa, Homo sapiens
MARATLSAAPSNPRLLRVALLLLLLVAASRRAAGAPLATELRCQCLQTLQGIHLKNIQSVKVKSPGPHCAQTEVIATLKNGQKACLNPASPMVKKIIEKMLKNGKSN

SEQ ID NO: 304 - protein, 107 aa, Macaca fascicularis
MASPALSTAPSNLRLLRVALLLLLLVAASRRAAGAPLVTELRCQCLQTLHGIHPKNIQSVNVKAPGPHCAQTEVIATLKNGQKACLNPASPMVKKIIGKMLNNGKSN

SEQ ID NO: 305 - protein, 104 aa, Bos taurus
MARAATAAAPRLLRAAMLLLLLVAAGRRAAGAPVVNELRCHCLQTLQGIHLKNIQSVKVTPPGPHCGQTEVIATLKNGQEACLNPEAPMVKKIINKMLNKGSTN

SEQ ID NO: 306 - protein, 107 aa, Sus scrofa
MASAAIAASPCAPRFLRAALLLLLLVAAGRRTAGAPVGGELRCQCLQTVQGIHLKNIQDLKVTSPGPHCDQTEVIATLKNGQEVCLNPAAPMVKKIIEKMLNKSSAN

SEQ ID NO: 307 - protein, 100 aa, Mus musculus
MAPPTCRLLSAALVLLLLLATNHQATGAVVASELRCQCLKTLPRVDFKNIQSLSVTPPGPHCAQTEVIATLKGGQKVCLDPEAPLVQKIIQKILNKGKAN

SEQ ID NO: 308 - protein, 100 aa, Rattus norvegicus
MAPPTRQLLNAVLVLLLLLATNHQGTGVVVASELRCQCLTTLPRVDFKNIQSLTVTPPGPHCAQTEVIATLKDGHEVCLNPEAPLVQRIVQKILNKGKAN

SEQ ID NO: 309 - protein, 107 aa, Homo sapiens
MAHATLSAAPSNPRLLRVALLLLLLVAASRRAAGASVVTELRCQCLQTLQGIHLKNIQSVNVRSPGPHCAQTEVIATLKNGKKACLNPASPMVQKIIEKILNKGSTN

SEQ ID NO: 310 - protein, 107 aa, Macaca mulatta
MAHATLSAAPSNPRLLRVALLLLLLVATGRRATGAPVATELRCQCLQTLQGIHPKNIQSVIVKAPGPHCAETEVIATLKNGQKACLNPASPMVQKIIEKILNKGSTN

SEQ ID NO: 311 - protein, 100 aa, Mus musculus
MAPPTCRLLSAALVLLLLLATNHQATGAVVASELRCQCLNTLPRVDFETIQSLTVTPPGPHCTQTEVIATLKDGQEVCLNPQGPRLQIIIKKILKSGKSS

SEQ ID NO: 312 - protein, 100 aa, Rattus norvegicus
MAPPTRRLLNAALLLLLLLMATSHQPSGTVVARELRCQCLKTLPRVDFENIQSLTVTPPGPHCTQTEVIATLKDGQEVCLNPQAPRLQKIIQKLLKSPSL

SEQ ID NO: 313 - protein, 101 aa, Homo sapiens
MSSAAGFCASRPGLLFLGLLLLPLVVAFASAEAEEDGDLQCLCVKTTSQVRPRHITSLEVIKAGPHCPTAQLIATLKNGRKICLDLQAPLYKKIIKKLLES

SEQ ID NO: 314 - protein, 88 aa, Bos taurus
ESSFPATFVPLPADSEGGEDEDLQCVCLKTTSGINPRHISSLEVIGAGTHCPSPQLLATKKTGRKICLDQQRPLYKKILKKLLDGDES

SEQ ID NO: 315 - protein, 90 aa, Sus scrofa
QEWSLPGTRVPPPADPEGGDANLRCVCVKTISGVSPKHISSLEVIGAGPHCPSPQLIATLKKGHKICLDPQNLLYKKIIKKLLKSQLLTA

SEQ ID NO: 316 - protein, 105 aa, Mus musculus
MSVAAVFRGLRPSPELLLLGLLFLPAVVAVTSAGPEESDGDLSCVCVKTISSGIHLKHITSLEVIKAGRHCAVPQLIATLKNGRKICLDRQAPLYKKVIKKILES

SEQ ID NO: 317 - protein, 105 aa, Rattus norvegicus
MSAAAVFRGLRPSPELLLLGLLLLPAVVAVTRASPEESDGDLSCVCVKTSSSRIHLKRITSLEVIKAGPHCAVPQLIATLKNGSKICLDRQVPLYKKIIKKLLES

SEQ ID NO: 318 - protein, 114 aa, Homo sapiens
MSLLSSRAARVPGPSSSLCALLVLLLLLTQPGPIASAGPAAAVLRELRCVCLQTTQGVHPKMISNLQVFAIGPQCSKVEVVASLKNGKEICLDPEAPFLKKVIQKILDGGNKEN

SEQ ID NO: 319 - protein, 109 aa, Macaca mulatta
MSLLPSRAARVPGPSGSLCTLLALLLLLTPPGPLSPGGSVAAALRELRCSCLETTQGVQPQMISNLQVFAIGPQCSEVEVVASLKNGTEVCLDPQAPFLKKVIQKILDG

SEQ ID NO: 320 - protein, 112 aa, Bos taurus
MRLLSSRAARVSGPSGSLCALLALLLLTPPGPLASAGPVAAVVRELRCVCLTTTPGIHPKTVSDLQVIAAGPQCSKVEVIATLKNGREVCLDPEAPLIKKIVQKILDSGKNN

SEQ ID NO: 321 - protein, 132 aa, Mus musculus
MSLQLRSSARIPSGSISPFMRMAPLAFLLLFTLPQHLAEAAPSSVIAATELRCVCLTVTPKINPKLIANLEVIPAGPQCPTVEVIAKLKNQKEVCLDPEAPVIKKIIQKILGSDKKKAKRNALAVERTASVQ

SEQ ID NO: 322 - protein, 130 aa, Rattus norvegicus
MSFQLRSSARIPSRSCSSFTLLAFLLLFTLPQHRAQAAPFSAMVATELRCVCLTLAPRINPKMIANLEVIPAGPHCPKVEVIAKLKNQKDNVCLDPQAPLIKKVIQKILGSENKKTKRNALALVRSASTQ

SEQ ID NO: 323 - protein, 114 aa, Homo sapiens
MSLPSSRAARVPGPSGSLCALLALLLLLTPPGPLASAGPVSAVLTELRCTCLRVTLRVNPKTIGKLQVFPAGPQCSKVEVVASLKNGKQVCLDPEAPFLKKVIQKILDSGNKKN

SEQ ID NO: 324 - protein, 123 aa, Macaca mulatta
MSLQSSRAASGLGPSGSLCALLALLLLLTPPGPLVSAGPVSAVLTELRCTCLHFTPRVNPKMIGKLQVFPVGPQCSRVEVIASLKNGKQVCLDPEAPFLKKSIQKILDSGKQEKLSKRKDHTS

SEQ ID NO: 325 - protein, 112 aa, Bos taurus; identical to SEQ ID NO: 320

SEQ ID NO: 326 - protein, 128 aa, Homo sapiens
MSLRLDTTPSCNSARPLHALQVLLLLSLLLTALASSTKGQTKRNLAKGKEESLDSDLYAELRCMCIKTTSGIHPKNIQSLEVIGKGTHCNQVEVIATLKDGRKICLDPDAPRIKKIVQKKLAGDESAD

SEQ ID NO: 327 - protein, 119 aa, Sus scrofa
MSLRLGAISSCTTSSPFPVLQVLLPLSLLLTTLVPATMGAAKIEGRMAHVELRCLCLNTVSGIHPSNIQSLEVIRAGAHCAKVEVIATLKNDKKICLDPEAPRIKKIVQKIMEDGGSAA

SEQ ID NO: 328 - protein, 113 aa, Mus musculus
MGFRLRPTSSCTRACPLHNLQILLLLGLILVALAPLTAGKSDGMDPYIELRCRCTNTISGIPFNSISLVNVYRPGVHCADVEVIATLKNGQKTCLDPNAPGVKRIVMKILEGY

SEQ ID NO: 329 - protein, 111 aa, Rattus norvegicus
MGFRLRPTSSCTRASSLRNLQVLLSLLLVALVPLAVGKPDNNEPFIELRCRCTNTLSGIPLNSISRVNVFRPGAHCDNVEVIATLKNGKEVCLDPTAPMIKKIVKKILEGY

SEQ ID NO: 330 - protein, 99 aa, Homo sapiens
MTSKLAVALLAAFLISAALCEGAVLPRSAKELRCQCIKTYSKPFHPKFIKELRVIESGPHCANTEIIVKLSDGRELCLDPKENWVQRVVEKFLKRAENS

SEQ ID NO: 331 - protein, 101 aa, Macaca mulatta
MTSKLAVALLAAFLLSAALCEGAVLPRSAKELRCECIKTYSKPFHPKFIKELRVIESGPHCANTEIIVKLSDGRELCLDPKEPWVQRVVEKFVKRAENQNP

SEQ ID NO: 332 - protein, 101 aa, Bos taurus
MTSKLAVALLAAFLLSAALCEAAVLSRMSTELRCQCIKTHSTPFHPKFIKELRVIESGPHCENSEIIVKLTNGNEVCLNPKEKWVQKVVQVFVKRAEKQDP

SEQ ID NO: 333 - protein, 103 aa, Sus scrofa
MTSKLAVAFLAVFLLSAALCEAAVLARVSAELRCQCINTHSTPFHPKFIKELRVIESGPHCENSEIIVKLVNGKEVCLDPKEKWVQKVVQIFLKRTEKQQQQQ

SEQ ID NO: 334 - protein, 103 aa, Gallus gallus
MNGKLGAVLALLLVSAALSQGRTLVKMGNELRCQCISTHSKFIHPKSIQDVKLTPSGPHCKNVEIIATLKDGREVCLDPTAPWVQLIVKALMAKAQLNSDAPL

SEQ ID NO: 335 - protein, 125 aa, Homo sapiens
MKKSGVLFLLGIILLVLIGVQGTPVVRKGRCSCISTNQGTIHLQSLKDLKQFAPSPSCEKIEIIATLKNGVQTCLNPDSADVKELIKKWEKQVSQKKKQKNGKKHQKKKVLKVRKSQRSRQKKTT

SEQ ID NO: 336 - protein, 125 aa, Macaca mulatta
MKKSGVLFLLGIIFLVLIGVQGTPVMRKGRCSCINTNQGTIHLQSLKDLKQFAPNLSCEKTEIIATLKNGDQTCLNPDSADVKELIKKWEKQVSQKKKQKNGKKHQKKKVLKVRKSQRPQQKKTT

SEQ ID NO: 337 - protein, 125 aa, Bos taurus
MKKSAPLFLGIIFLTLTGVQGVPAIRNGRCSCINTSQGMIHPKSLKDLKQFAPSPSCEKTEIIATMKNGNEACLNPDLPEVKELIKEWEKQVNQKKKQRKGKKYKKTKKVPKVKRSQRPSQKKTT

SEQ ID NO: 338 - protein, 126 aa, Sus scrofa
MKKSSVALLLGIIFLTLIGVQGTLLMRNGRCSCINTSQRMIHLKSLRDLKQFAPSPSCEKMEVIATMKNGDQTCLNPDSPDVKKLIKEWEKQVSLKKKQKKGKKHPKTKKVRKVKKSQRPDQKKMT

SEQ ID NO: 339 - protein, 126 aa, Mus musculus
MKSAVLFLLGIIFLEQCGVRGTLVIRNARCSCISTSRGTIHYKSLKDLKQFAPSPNCNKTEIIATLKNGDQTCLDPDSANVKKLMKEWEKKISQKKKQKRGKKHQKNMKNRKPKTPQSRRRSRKTT

SEQ ID NO: 340 - protein, 125 aa, Rattus norvegicus
MKSVALFLMGIIFLDHCGVRGTLVIRNQRCSCISTSQGTFHYKSLKDLKQFAPSPNCNKTEIIATLKNGDQTCLDPDSARVKKLMKEWEKKISQKKKQKRGKNHQRSKKTRKAKTPHHPESKKTA

SEQ ID NO: 341 - protein, 98 aa, Homo sapiens
MNQTAILICCLIFLTLSGIQGVPLSRTVRCTCISISNQPVNPRSLEKLEIIPASQFCPRVEIIATMKKKGEKRCLNPESKAIKNLLKAVSKERSKRSP

SEQ ID NO: 342 - protein, 98 aa, Macaca mulatta
MNQTAILICCLVFLTLSGIQGIPLSRTVRCTCISISNQPVNPRSLEKLEIIPPSQFCPHVEIIATMKKKGEKRCLNPESKAIKNLLKAVSKERSKRSP

SEQ ID NO: 343 - protein, 102 aa, Bos taurus
MNKSGFLIFCLILLTLSQGVPLSRNTRCSCIEISNGSVNPRSLEKLEVIPASQSCPRVEIIATMKKNGEKRCLNPESKTIKNLLKAINKQRTKRSPRTRKEA

SEQ ID NO: 344 - protein, 104 aa, Sus scrofa
MNQSAVLIFCLILLTLSGTQGIPLSRTVRCTCIKISDRPVNPRSLEKLEMIPASQSCPHVEIIATMKKNGEKRCLNPESKAIKNLLKAISKERSKRSPRTQREA

SEQ ID NO: 345 - protein, 98 aa, Mus musculus
MNPSAAVIFCLILLGLSGTQGIPLARTVRCNCIHIDDGPVRMRAIGKLEIIPASLSCPRVEIIATMKKNDEQRCLNPESKTIKNLMKAFSQKRSKRAP

SEQ ID NO: 346 - protein, 98 aa, Rattus norvegicus
MNPSAAVVLCLVLLSLSGTQGIPLARTVRCTCIDFHEQTLRPRAIGKLEIIPASLSCPHVEIIATMKKNNEKRCLNPESEAIKSLLKAVSQRRSKRAP

SEQ ID NO: 347 - protein, 94 aa, Homo sapiens
MSVKGMAIALAVILCATVVQGFPMFKRGRCLCIGPGVKAVKVADIEKASIMYPSNNCDKIEVIITLKENKGQRCLNPKSKQARLIIKKVERKNF

SEQ ID NO: 348 - protein, 94 aa, Macaca mulatta
MSVKGMAIALAMILCTTVVQGFPMFKRGRCLCIGPGVKAVKVADIEKASIIYPSNNCDKIEVIITLKENKGQRCLNPKSKQARLIIKKVERKNF

SEQ ID NO: 349 - protein, 100 aa, Bos taurus
MSVKGMAIVLTVILCAAIVQGFPMFKGGRCLCIGPGVKAVKVADIEKVSIIYPTNNCDKTEVIITLKTHKGQRCLNPKAKQAKAIIKKVQRKNSEKYKNI

SEQ ID NO: 350 - protein, 100 aa, Sus scrofa
MGVKGMAIVLAVIFCATTIQGFPMFKAGRCLCIGPGVKAVKVADIEKVSIIHPSNNCDKTEVIVTLKAHKGRRCLNPKSKQANVIMKKVERMNFLRYQNV

SEQ ID NO: 351 - protein, 100 aa, Mus musculus
MNRKVTAIALAAIIWATAAQGFLMFKQGRCLCIGPGMKAVKMAEIEKASVIYPSNGCDKVEVIVTMKAHKRQRCLDPRSKQARLIMQAIEKKNFLRRQNM

SEQ ID NO: 352 - protein, 100 aa, Rattus norvegicus
MNRTGMAVALAMIIWATTVPGFVMFKGGRCLCIDRGVKVVKMAAIKEVSVIYPSNGCDKVEVIVTLKAHKGQRCLDPTSKQARLIMQTIQKKNFLRRQNM

SEQ ID NO: 353 - protein, 89 aa, Homo sapiens
MNAKVVVVLVLVLTALCLSDGKPVSLSYRCPCRFFESHVARANVKHLKILNTPNCALQIVARLKNNNRQVCIDPKLKWIQEYLEKALNK

SEQ ID NO: 354 - protein, 89 aa, Macaca mulatta
MNAKVVVVLALVLTTLCLSDGKPVSLSYRCPCRFFESHVARANVKHLKILNTPNCALQIVARLKNNNRQVCIDPKLKWIQEYLEKALNK

SEQ ID NO: 355 - protein, 89 aa, Bos taurus
MDAKVFVVLALVLTALCLSDAKPVSLSYRCPCRFFESHVAKANVKHLKILNTPNCSLQIVARLKNNNRQVCIDPKLKWIQEYLDKALNK

SEQ ID NO: 356 - protein, 116 aa, Sus scrofa
MGVKVLAVLALVLTALCLSDEKPVSLSYRCPCRFFESHVARANIKHLKILNTPNCALQIVARLKSNNRQVCIDPKLKWIQEYLEKALNKPSPTLSGLTSALGSSLASTTVGITSRS

SEQ ID NO: 357 - protein, 89 aa, Mus musculus
MDAKVVAVLALVLAALCISDGKPVSLSYRCPCRFFESHIARANVKHLKILNTPNCALQIVARLKNNNRQVCIDPKLKWIQEYLEKALNK

SEQ ID NO: 358 - protein, 89 aa, Rattus norvegicus
MDAKVVAVLALVLAALCISDGKPVSLSYRCPCRFFESHVARANVKHLKILNTPNCALQIVARLKSNNRQVCIDPKLKWIQEYLDKALNK

SEQ ID NO: 359 - protein, 89 aa, Gallus gallus
MDLRALALLAFALAVISLSEEKPVSLTYRCPCRFFESNVARANIKHLKILSTPNCSLQIVARLKSNSKQVCIDPKLKWIQEYLEKALNK

SEQ ID NO: 360 - protein, 109 aa, Homo sapiens
MKFISTSLLLMLLVSSLSPVQGVLEVYYTSLRCRCVQESSVFIPRRFIDRIQILPRGNGCPRKEIIVWKKNKSIVCVDPQAEWIQRMMEVLRKRSSSTLPVPVFKRKIP

SEQ ID NO: 361 - protein, 109 aa, Macaca mulatta
MKFISASLLLMLLVSSLSPVQGVLEVYYTHLRCRCVQESSVFIPRRFIDRIQISPRGNGCPRKEIIVWKKNKSVVCVDPQAEWIQRIMEMLRKKSSSTPPVPVFKRKIP

SEQ ID NO: 362 - protein, 109 aa, Bos taurus
MRFTPGALILMLLAFSLSPVHGVLETNNTNLKCKCIRKTVSFFPVNLIERLNIIPRGRGCPNTEIIVWMKNKLVICLNPQAKWTQTLIKVLSKRILSTSPAPVVKKRSD

SEQ ID NO: 363 - protein, 109 aa, Mus musculus
MRLSTATLLLLLASCLSPGHGILEAHYTNLKCRCSGVISTVVGLNIIDRIQVTPPGNGCPKTEVVIWTKMKKVICVNPRAKWLQRLLRHVQSKSLSSTPQAPVSKRRAA

SEQ ID NO: 364 - protein, 108 aa, Rattus norvegicus
MRLCTAALLLLLAICLPPGHGILETHYTNLKCRCSKVSSTFINLILVDWIQVIRPGNGCPKTEIIFWTKAKKAICVNPTARWLPKVLKFVRRSITSTPQAPVSKKRAA

SEQ ID NO: 365 - protein, 111 aa, Homo sapiens
MSLLPRRAPPVSMRLLAAALLLLLLALYTARVDGSKCKCSRKGPKIRYSDVKKLEMKPKYPHCEEKMVIITTKSVSRYRGQEHCLHPKLQSTKRFIKWYNAWNEKRRVYEE

SEQ ID NO: 366 - protein, 111 aa, Macaca mulatta; identical to SEQ ID NO: 365

SEQ ID NO: 367 - protein, 99 aa, Bos taurus
MRLLTAALLLLLLALCAARVDGSKCKCSRKGPKIRYSDVKKLEMKPKYPHCEEKMVIITTKSMSRYRGQEHCLHPKLQSTKRFIKWYNAWNEKRRVYEE

SEQ ID NO: 368 - protein, 99 aa, Sus scrofa; identical to SEQ ID NO: 367

SEQ ID NO: 369 - protein, 99 aa, Mus musculus
MRLLAAALLLLLLALCASRVDGSKCKCSRKGPKIRYSDVKKLEMKPKYPHCEEKMVIVTTKSMSRYRGQEHCLHPKLQSTKRFIKWYNAWNEKRRVYEE

SEQ ID NO: 370 - protein, 99 aa, Rattus norvegicus
MRLLAAALLLLLLALCASRVDGSKCKCSRKGPKIRYSDVKKLEMKPKYPHCEEKMVIITTKSMSRYRGQEHCLHPKLQSTKRFIKWYNAWNEKRRVYEE

SEQ ID NO: 371 - protein, 98 aa, Gallus gallus
MKLLTAALLLLVIAMCLASAEGVKCKCSRKGPKIRFSNVRKLEIKPRYPFCVEEMIIVTLWTKVRGEQQHCLNPKRQNTVRLLKWYRVWKEKGRVYEE

SEQ ID NO: 372 - protein, 254 aa, Homo sapiens
MGRDLRPGSRVLLLLLLLLLVYLTQPGNGNEGSVTGSCYCGKRISSDSPPSVQFMNRLRKHLRAYHRCLYYTRFQLLSWSVCGGNKDPWVQELMSCLDLKECGHAYSGIVAHQKHLLPTSPPISQASEGASSDIHTPAQMLLSTLQSTQRPTLPVGSLSSDKELTRPNETTIHTAGHSLAAGPEAGENQKQPEKNAGPTARTSATVPVLCLLAIIFILTAALSYVLCKRRRGQSPQSSPDLPVHYIPVAPDSNT

SEQ ID NO: 373 - protein, 252 aa, Bos taurus
MMLGRTSRLLLVLLFIAYATTSGNGNEGSKVGSCPCDHTVSSHSPPNENIMRHLRKYLKAYQRCFSYVRFQLPLKNVCGGSTDGWVQELMHCFDSGECGHAQPRVVDAPLHRTQLPEPTEAAPSDTATTSQTYLPSTLQRTQQPTPLEGALSLDSKLIPTHETTTYTSGHSLGAEPEAKENQKQLKENRGPQAGTSATVPVLSLLAIVFILAGVLLYVVCKRRKNQLLQHPPDLAASLYTCSRRTRAENGTL

SEQ ID NO: 374 - protein, 250 aa, Sus scrofa
MPLWELWFFLLALFLAWLTPPGNGNEGSMAGSCPCNRRISSHSPPTDHDMRHLRKYLNHYQHCTSYVRFQLPRGSVCGGSSDQWVLKLMGCFDRGECGRAHARTVAHQQHLAPQNTRVPELPERAPPDSSTPAQTNLPSTLQPTQKPTLPEGMPSLAKKLIPTSETDTSTVGHSLGAKSEARENQEQLGKNVGATAGTSALVPVLSLLVIIFLLTGVLLYVMCKKRQEQSRQYPPDPQLHYVPVASNINT

SEQ ID NO: 375 - protein, 246 aa, Mus musculus
MRRGFGPLSLAFFLFLLALLTLPGDGNQGSVAGSCSCDRTISSGTQIPQGTLDHIRKYLKAFHRCPFFIRFQLQSKSVCGGSQDQWVRELVDCFERKECGTGHGKSFHHQKHLPQASTQTPEAAEGTPSDTSTPAHSQSTQHSTLPSGALSLNKEHTQPWEMTTLPSGYGLEARPEAEANEKQQDDRQQEAPGAGASTPAWVPVLSLLAIVFFLTAAMAYVLCNRRATQQNSAGLQLWYTPVEPRP

SEQ ID NO: 376 - protein, 247 aa, Rattus norvegicus
MRRGFGPLALTLFLFFFALLTLPGDGNQGSVAGSCYCDRTIPSGTQIPPATLNHMRKYLKTFHRCQFFIRFQLQSKSVCGGSQDQWVRELVNCFEHKQCGIGHGQSFHHQKHVPQASTRIPEATEGKPPDTSTAVQFQSTQQSTFPSGAPSLNKELTRHWETTILPSGYGLEARPVAEANEKQHKQQKEPGAGAGTQALVPVLSLLAIVFFLVAAMVCVLCNRRVTRQSSSGLQLCYTPVEPRPQGL

SEQ ID NO: 377 - protein, 312 aa, Homo sapiens
MANNDAVLKRLEQKGAEADQIIEYLKQQVSLLKEKAILQATLREEKKLRVENAKLKKEIEELKQELIQAEIQNGVKQIAFPSGTPLHANSMVSENVIQSTAVTTVSSGTKEQIKGGTGDEKKAKEKIEKKGEKKEKKQQSIAGSADSKPIDVSRLDLRIGCIITARKHPDADSLYVEEVDVGEIAPRTVVSGLVNHVPLEQMQNRMVILLCNLKPAKMRGVLSQAMVMCASSPEKIEILAPPNGSVPGDRITFDAFPGEPDKELNPKKKIWEQIQPDLHTNDECVATYKGVPFEVKGKGVCRAQTMSNSGIK

SEQ ID NO: 378 - protein, 310 aa, Mus musculus
MATNDAVLKRLEQKGAEADQIIEYLKQQVALLKEKAILQATMREEKKLRVENAKLKKEIEELKQELILAEIHNGVEQVRVRLSTPLQTNCTASESVVQSPSVATTASPATKEQIKAGEEKKVKEKTEKKGEKKEKQQSAAASTDSKPIDASRLDLRIGCIVTAKKHPDADSLYVEEVDVGEAAPRTVVSGLVNHVPLEQMQNRMVVLLCNLKPAKMRGVLSQAMVMCASSPEKVEILAPPNGSVPGDRITFDAFPGEPDKELNPKKKIWEQIQPDLHTNAECVATYKGAPFEVKGKGVCRAQTMANSGIK

SEQ ID NO: 379 - protein, 299 aa, Bombyx mori
MLKLSFVLRRNMSQSVTKLINNADIAEKRLAELRKKLEEVKKFKIEEKIKQLIQENNTLSAKVNAAKAELIGLEISHGKRQYAIPGKTDLLETTKIVTTIQDSVCNEKPIIDKKEKKVKDSNKKPKDKPSESADIAVDVRKLDFRIGKIVEISKHPDADSLYVEKIDCGEENPRTVVSGLVNHVPIDEMRERIVMVLCNLKPVKMRGVTSEAMVMCASSAEKVEVLIPPPDAIPGDWVVCEGYPREPEAVLNPKKKILETCAPDLKTNNEKIACYKGNPIIVPGKGPIIAPTLINVNVK

SEQ ID NO: 380 - protein, 268 aa, Artificial Sequence
  Recombinant Green Fluorescent Protein (GFP)
MEGPVTGTGSRYLGGRSASFANSGGGGGASKGEELFTGVVPILVELDGDVNGHKFSVSGEGEGDATYGKLTLKFICTTGKLPVPWPTLVTTLCYGVQCFSRYPDHMKRHDFFKSAMPEGYVQERTIFFKDDGNYKTRAEVKFEGDTLVNRIELKGIDFKEDGNILGHKLEYNYNSHNVYIMADKQKNGIKVNFKTRHNIEDGSVQLADHYQQNTPIGDGPVLLPDNHYLSTQSALSKDPNEKRDHMVLLEFVTAAGITHGMDELYNID

SEQ ID NO: 381 - DNA, 804 bp, Artificial Sequence
  Open reading frame encoding recombinant Green Fluorescent Protein (GFP)
atggagggcccggttaccggtaccggatccagatatctgggcggccgctcagcaagcttcgcgaattcgggaggcggaggtggagctagcaaaggagaagaactcttcactggagttgtcccaattcttgttgaattagatggtgatgttaacggccacaagttctctgtcagtggagagggtgaaggtgatgcaacatacggaaaacttaccctgaagttcatctgcactactggcaaactgcctgttccatggccaacactagtcactactctgtgctatggtgttcaatgcttttcaagatacccggatcatatgaaacggcatgactttttcaagagtgccatgcccgaaggttatgtacaggaaaggaccatcttcttcaaagatgacggcaactacaagacacgtgctgaagtcaagtttgaaggtgatacccttgttaatagaatcgagttaaaaggtattgacttcaaggaagatggcaacattctgggacacaaattggaatacaactataactcacacaatgtatacatcatggcagacaaacaaaagaatggaatcaaagtgaacttcaagacccgccacaacattgaagatggaagcgttcaactagcagaccattatcaacaaaatactccaattggcgatggccctgtccttttaccagacaaccattacctgtccacacaatctgccctttcgaaagatcccaacgaaaagagagaccacatggtccttcttgagtttgtaacagctgctgggattacacatggcatggatgaactgtacaacatcgat

SEQ ID NO: 382 - protein, 710 aa, Artificial Sequence
  Recombinant Green Fluorescent Protein (GFP)-BoNT/A light chain fusion protein
MEGPVTGTGSRYLGGRSASFANSGGGGGASKGEELFTGVVPILVELDGDVNGHKFSVSGEGEGDATYGKLTLKFICTTGKLPVPWPTLVTTLCYGVQCFSRYPDHMKRHDFFKSAMPEGYVQERTIFFKDDGNYKTRAEVKFEGDTLVNRIELKGIDFKEDGNILGHKLEYNYNSHNVYIMADKQKNGIKVNFKTRHNIEDGSVQLADHYQQNTPIGDGPVLLPDNHYLSTQSALSKDPNEKRDHMVLLEFVTAAGITHGMDELYNIDGGGGGPFVNKQFNYKDPVNGVDIAYIKIPNAGQMQPVKAFKIHNKIWVIPERDTFTNPEEGDLNPPPEAKQVPVSYYDSTYLSTDNEKDNYLKGVTKLFERIYSTDLGRMLLTSIVRGIPFWGGSTIDTELKVIDTNCINVIQPDGSYRSEELNLVIIGPSADIIQFECKSFGHEVLNLTRNGYGSTQYIRFSPDFTFGFEESLEVDTNPLLGAGKFATDPAVTLAHELIHAGHRLYGIAINPNRVFKVNTNAYYEMSGLEVSFEELRTFGGHDAKFIDSLQENEFRLYYYNKFKDIASTLNKAKSIVGTTASLQYMKNVFKEKYLLSEDTSGKFSVDKLKFDKLYKMLTEIYTEDNFVKFFKVLNRKTYLNFDKAVFKINIVPKVNYTIYDGFNLRNTNLAANFNGQNTEINNMNFTKLKNFTGLFEFYKLLCVRGIITSK

SEQ ID NO: 383 - DNA, 2130 bp, Artificial Sequence
  Open Reading Frame of recombinant Green Fluorescent Protein- BoNT/A light chain
atggagggcccggttaccggtaccggatccagatatctgggcggccgctcagcaagcttcgcgaattcgggaggcggaggtggagctagcaaaggagaagaactcttcactggagttgtcccaattcttgttgaattagatggtgatgttaacggccacaagttctctgtcagtggagagggtgaaggtgatgcaacatacggaaaacttaccctgaagttcatctgcactactggcaaactgcctgttccatggccaacactagtcactactctgtgctatggtgttcaatgcttttcaagatacccggatcatatgaaacggcatgactttttcaagagtgccatgcccgaaggttatgtacaggaaaggaccatcttcttcaaagatgacggcaactacaagacacgtgctgaagtcaagtttgaaggtgatacccttgttaatagaatcgagttaaaaggtattgacttcaaggaagatggcaacattctgggacacaaattggaatacaactataactcacacaatgtatacatcatggcagacaaacaaaagaatggaatcaaagtgaacttcaagacccgccacaacattgaagatggaagcgttcaactagcagaccattatcaacaaaatactccaattggcgatggccctgtccttttaccagacaaccattacctgtccacacaatctgccctttcgaaagatcccaacgaaaagagagaccacatggtccttcttgagtttgtaacagctgctgggattacacatggcatggatgaactgtacaacatcgatggaggcggaggtggaccttttgttaataaacaatttaattataaagatcctgtaaatggtgttgatattgcttatataaaaattccaaatgcaggacaaatgcaaccagtaaaagcttttaaaattcataataaaatatgggttattccagaaagagatacatttacaaatcctgaagaaggagatttaaatccaccaccagaagcaaaacaagttccagtttcatattatgattcaacatatttaagtacagataatgaaaaagataattatttaaagggagttacaaaattatttgagagaatttattcaactgatcttggaagaatgttgttaacatcaatagtaaggggaataccattttggggtggaagtacaatagatacagaattaaaagttattgatactaattgtattaatgtgatacaaccagatggtagttatagatcagaagaacttaatctagtaataataggaccctcagctgatattatacagtttgaatgtaaaagctttggacatgaagttttgaatcttacgcgaaatggttatggctctactcaatacattagatttagcccagattttacatttggttttgaggagtcacttgaagttgatacaaatcctcttttaggtgcaggcaaatttgctacagatccagcagtaacattagcacatgaacttatacatgctggacatagattatatggaatagcaattaatccaaatagggtttttaaagtaaatactaatgcctattatgaaatgagtgggttagaagtaagctttgaggaacttagaacatttgggggacatgatgcaaagtttatagatagtttacaggaaaacgaatttcgtctatattattataataagtttaaagatatagcaagtacacttaataaagctaaatcaatagtaggtactactgcttcattacagtatatgaaaaatgtttttaaagagaaatatctcctatctgaagatacatctggaaaattttcggtagataaattaaaatttgataagttatacaaaatgttaacagagatttacacagaggataattttgttaagttttttaaagtacttaacagaaaaacatatttgaattttgataaagccgtatttaagataaatatagtacctaaggtaaattacacaatatatgatggatttaatttaagaaatacaaatttagcagcaaactttaatggtcaaaatacagaaattaataatatgaattttactaaactaaaaaattttactggattgtttgaattttataagttgctatgtgtaagagggataatcacttcgaaa

SEQ ID NO: 384 - protein, 694 aa, Artificial Sequence
  Recombinant Green Fluorescent Protein (GFP)-BoNT/B light chain fusion protein
MASKGEELFTGVVPILVELDGDVNGHKFSVSGEGEGDATYGKLTLKFICTTGKLPVPWPTLVTTLCYGVQCFSRYPDHMKRHDFFKSAMPEGYVQERTIFFKDDGNYKTRAEVKFEGDTLVNRIELKGIDFKEDGNILGHKLEYNYNSHNVYIMADKQKNGIKVNFKTRHNIEDGSVQLADHYQQNTPIGDGPVLLPDNHYLSTQSALSKDPNEKRDHMVLLEFVTAAGITHGMDELYNIDGGGGGKGPVTGTGSPVTINNFNYNDPIDNNNIIMMEPPFARGTGRYYKAFKITDRIWIIPERYTFGYKPEDFNKSSGIFNRDVCEYYDPDYLNTNDKKNIFLQTMIKLFNRIKSKPLGEKLLEMIINGIPYLGDRRVPLEEFNTNIASVTVNKLISNPGEVERKKGIFANLIIFGPGPVLNENETIDIGIQNHFASREGFGGIMQMKFCPEYVSVFNNVQENKGASIFNRRGYFSDPALILMHELIHVLHGLYGIKVDDLPIVPNEKKFFMQSTDAIQAEELYTFGGQDPSIITPSTDKSIYDKVLQNFRGIVDRLNKVLVCISDPNININIYKNKFKDKYKFVEDSEGKYSIDVESFDKLYKSLMFGFTETNIAENYKIKTRASYFSDSLPPVKIKNLLDNEIYTIEEGFNISDKDMEKEYRGQNKAINKQAYEEISKEHLAVYKIQMCKSV

SEQ ID NO: 385 - DNA, 2082 bp, Artificial Sequence
  Open Reading Frame of recombinant Green Fluorescent Protein- BoNT/B light chain
atggctagcaaaggagaagaactcttcactggagttgtcccaattcttgttgaattagatggtgatgttaacggccacaagttctctgtcagtggagagggtgaaggtgatgcaacatacggaaaacttaccctgaagttcatctgcactactggcaaactgcctgttccatggccaacactagtcactactctgtgctatggtgttcaatgcttttcaagatacccggatcatatgaaacggcatgactttttcaagagtgccatgcccgaaggttatgtacaggaaaggaccatcttcttcaaagatgacggcaactacaagacacgtgctgaagtcaagtttgaaggtgatacccttgttaatagaatcgagttaaaaggtattgacttcaaggaagatggcaacattctgggacacaaattggaatacaactataactcacacaatgtatacatcatggcagacaaacaaaagaatggaatcaaagtgaacttcaagacccgccacaacattgaagatggaagcgttcaactagcagaccattatcaacaaaatactccaattggcgatggccctgtccttttaccagacaaccattacctgtccacacaatctgccctttcgaaagatcccaacgaaaagagagaccacatggtccttcttgagtttgtaacagctgctgggattacacatggcatggatgaactgtacaacatcgatggaggcggaggtggaaagggcccggttaccggtaccggatccccagttacaataaataattttaattataatgatcctattgataataataatattattatgatggagcctccatttgcgagaggtacggggagatattataaagcttttaaaatcacagatcgtatttggataataccggaaagatatacttttggatataaacctgaggattttaataaaagttccggtatttttaatagagatgtttgtgaatattatgatccagattacttaaatactaatgataaaaagaatatatttttacaaacaatgatcaagttatttaatagaatcaaatcaaaaccattgggtgaaaagttattagagatgattataaatggtataccttatcttggagatagacgtgttccactcgaagagtttaacacaaacattgctagtgtaactgttaataaattaatcagtaatccaggagaagtggagcgaaaaaaaggtattttcgcaaatttaataatatttggacctgggccagttttaaatgaaaatgagactatagatataggtatacaaaatcattttgcatcaagggaaggcttcgggggtataatgcaaatgaagttttgcccagaatatgtaagcgtatttaataatgttcaagaaaacaaaggcgcaagtatatttaatagacgtggatatttttcagatccagccttgatattaatgcatgaacttatacatgttttacatggattatatggcattaaagtagatgatttaccaattgtaccaaatgaaaaaaaattttttatgcaatctacagatgctatacaggcagaagaactatatacatttggaggacaagatcccagcatcataactccttctacggataaaagtatctatgataaagttttgcaaaattttagagggatagttgatagacttaacaaggttttagtttgcatatcagatcctaacattaatattaatatatataaaaataaatttaaagataaatataaattcgttgaagattctgagggaaaatatagtatagatgtagaaagttttgataaattatataaaagcttaatgtttggttttacagaaactaatatagcagaaaattataaaataaaaactagagcttcttattttagtgattccttaccaccagtaaaaataaaaaatttattagataatgaaatctatactatagaggaagggtttaatatatctgataaagatatggaaaaagaatatagaggtcagaataaagctataaataaacaagcttatgaagaaattagcaaggagcatttggctgtatataagatacaaatgtgtaaaagtgtt

SEQ ID NO: 386 - protein, 706 aa, Artificial Sequence
  Recombinant Green Fluorescent Protein (GFP)-BoNT/C1 light chain fusion protein
MASKGEELFTGVVPILVELDGDVNGHKFSVSGEGEGDATYGKLTLKFICTTGKLPVPWPTLVTTLCYGVQCFSRYPDHMKRHDFFKSAMPEGYVQERTIFFKDDGNYKTRAEVKFEGDTLVNRIELKGIDFKEDGNILGHKLEYNYNSHNVYIMADKQKNGIKVNFKTRHNIEDGSVQLADHYQQNTPIGDGPVLLPDNHYLSTQSALSKDPNEKRDHMVLLEFVTAAGITHGMDELYNIDGGGGGKGPVTGTGDVSIMPITINNFNYSDPVDNKNILYLDTHLNTLANEPEKAFRITGNIWVIPDRFSRNSNPNLNKPPRVTSPKSGYYDPNYLSTDSDKDTFLKEIIKLFKRINSREIGEELIYRLSTDIPFPGNNNTPINTFDFDVDFNSVDVKTRQGNNWVKTGSINPSVIITGPRENIIDPETSTFKLTNNTFAAQEGFGALSIISISPRFMLTYSNATNDVGEGRFSKSEFCMDPILILMHELNHAMHNLYGIAIPNDQTISSVTSNIFYSQYNVKLEYAEIYAFGGPTIDLIPKSARKYFEEKALDYYRSIAKRLNSITTANPSSFNKYIGEYKQKLIRKYRFVVESSGEVTVNRNKFVELYNELTQIFTEFNYAKIYNVQNRKIYLSNVYTPVTANILDDNVYDIQNGFNIPKSNLNVLFMGQNLSRNPALRKVNPENMLYLFTKFCHKAIDGRSNSD

SEQ ID NO: 387 - DNA, 2118 bp, Artificial Sequence
  Open Reading Frame of recombinant Green Fluorescent Protein-BoNT/C1 light chain
atggctagcaaaggagaagaactcttcactggagttgtcccaattcttgttgaattagatggtgatgttaacggccacaagttctctgtcagtggagagggtgaaggtgatgcaacatacggaaaacttaccctgaagttcatctgcactactggcaaactgcctgttccatggccaacactagtcactactctgtgctatggtgttcaatgcttttcaagatacccggatcatatgaaacggcatgactttttcaagagtgccatgcccgaaggttatgtacaggaaaggaccatcttcttcaaagatgacggcaactacaagacacgtgctgaagtcaagtttgaaggtgatacccttgttaatagaatcgagttaaaaggtattgacttcaaggaagatggcaacattctgggacacaaattggaatacaactataactcacacaatgtatacatcatggcagacaaacaaaagaatggaatcaaagtgaacttcaagacccgccacaacattgaagatggaagcgttcaactagcagaccattatcaacaaaatactccaattggcgatggccctgtccttttaccagacaaccattacctgtccacacaatctgccctttcgaaagatcccaacgaaaagagagaccacatggtccttcttgagtttgtaacagctgctgggattacacatggcatggatgaactgtacaacatcgatggaggcggaggtggaaagggcccggttaccggtaccggagatgttagtattatgccaataacaattaacaactttaattattcagatcctgttgataataaaaatattttatatttagatactcatttaaatacactagctaatgagcctgaaaaagcctttcgcattacaggaaatatatgggtaatacctgatagattttcaagaaattctaatccaaatttaaataaacctcctcgagttacaagccctaaaagtggttattatgatcctaattatttgagtactgattctgacaaagatacatttttaaaagaaattataaagttatttaaaagaattaattctagagaaataggagaagaattaatatatagactttcgacagatataccctttcctgggaataacaatactccaattaatacttttgattttgatgtagattttaacagtgttgatgttaaaactagacaaggtaacaactgggttaaaactggtagcataaatcctagtgttataataactggacctagagaaaacattatagatccagaaacttctacgtttaaattaactaacaatacttttgcggcacaagaaggatttggtgctttatcaataatttcaatatcacctagatttatgctaacatatagtaatgcaactaatgatgtaggagagggtagattttctaagtctgaattttgcatggatccaatactaattttaatgcatgaacttaatcatgcaatgcataatttatatggaatagctataccaaatgatcaaacaatttcatctgtaactagtaatattttttattctcaatataatgtgaaattagagtatgcagaaatatatgcatttggaggtccaactatagaccttattcctaaaagtgcaaggaaatattttgaggaaaaggcattggattattatagatctatagctaaaagacttaatagtataactactgcaaatccttcaagctttaataaatatataggggaatataaacagaaacttattagaaagtatagattcgtagtagaatcttcaggtgaagttacagtaaatcgtaataagtttgttgagttatataatgaacttacacaaatatttacagaatttaactacgctaaaatatataatgtacaaaataggaaaatatatctttcaaatgtatatactccggttacggcgaatatattagacgataatgtttatgatatacaaaatggatttaatatacctaaaagtaatttaaatgtactatttatgggtcaaaatttatctcgaaatccagcattaagaaaagtcaatcctgaaaatatgctttatttatttacaaaattttgtcataaagcaatagatggtagatcgaattctgac

SEQ ID NO: 388 - protein, 681 aa, Artificial Sequence
  Recombinant Green Fluorescent Protein (GFP)-BoNT/E light chain fusion protein
MASKGEELFTGVVPILVELDGDVNGHKFSVSGEGEGDATYGKLTLKFICTTGKLPVPWPTLVTTLCYGVQCFSRYPDHMKRHDFFKSAMPEGYVQERTIFFKDDGNYKTRAEVKFEGDTLVNRIELKGIDFKEDGNILGHKLEYNYNSHNVYIMADKQKNGIKVNFKTRHNIEDGSVQLADHYQQNTPIGDGPVLLPDNHYLSTQSALSKDPNEKRDHMVLLEFVTAAGITHGMDELYNIDGGGGGKGPVTGTGSPKINSFNYNDPVNDRTILYIKPGGCQEFYKSFNIMKNIWIIPERNVIGTTPQDFHPPTSLKNGDSSYYDPNYLQSDEEKDRFLKIVTKIFNRINNNLSGGILLEELSKANPYLGNDNTPDNQFHIGDASAVEIKFSNGSQDILLPNVIIMGAEPDLFETNSSNISLRNNYMPSNHGFGSIAIVTFSPEYSFRFNDNSMNEFIQDPALTLMHELIHSLHGLYGAKGITTKYTITQKQNPLITNIRGTNIEEFLTFGGTDLNIITSAQSNDIYTNLLADYKKIASKLSKVQVSNPLLNPYKDVFEAKYGLDKDASGIYSVNINKFNDIFKKLYSFTEFDLATKFQVKCRQTYIGQYKYFKLSNLLNDSIYNISEGYNINNLKVNFRGQNANLNPRIITPITGRGLVKKIIRFCKNIVSVKGIRKLREF

SEQ ID NO: 389 - DNA, 2043 bp, Artificial Sequence
  Open Reading Frame of recombinant Green Fluorescent Protein- BoNT/E light chain
atggctagcaaaggagaagaactcttcactggagttgtcccaattcttgttgaattagatggtgatgttaacggccacaagttctctgtcagtggagagggtgaaggtgatgcaacatacggaaaacttaccctgaagttcatctgcactactggcaaactgcctgttccatggccaacactagtcactactctgtgctatggtgttcaatgcttttcaagatacccggatcatatgaaacggcatgactttttcaagagtgccatgcccgaaggttatgtacaggaaaggaccatcttcttcaaagatgacggcaactacaagacacgtgctgaagtcaagtttgaaggtgatacccttgttaatagaatcgagttaaaaggtattgacttcaaggaagatggcaacattctgggacacaaattggaatacaactataactcacacaatgtatacatcatggcagacaaacaaaagaatggaatcaaagtgaacttcaagacccgccacaacattgaagatggaagcgttcaactagcagaccattatcaacaaaatactccaattggcgatggccctgtccttttaccagacaaccattacctgtccacacaatctgccctttcgaaagatcccaacgaaaagagagaccacatggtccttcttgagtttgtaacagctgctgggattacacatggcatggatgaactgtacaacatcgatggaggcggaggtggaaagggcccggttaccggtaccggatccccaaaaattaatagttttaattataatgatcctgttaatgatagaacaattttatatattaaaccaggcggttgtcaagaattttataaatcatttaatattatgaaaaatatttggataattccagagagaaatgtaattggtacaaccccccaagattttcatccgcctacttcattaaaaaatggagatagtagttattatgaccctaattatttacaaagtgatgaagaaaaggatagatttttaaaaatagtcacaaaaatatttaatagaataaataataatctttcaggagggattttattagaagaactgtcaaaagctaatccatatttagggaatgataatactccagataatcaattccatattggtgatgcatcagcagttgagattaaattctcaaatggtagccaagacatactattacctaatgttattataatgggagcagagcctgatttatttgaaactaacagttccaatatttctctaagaaataattatatgccaagcaatcacggttttggatcaatagctatagtaacattctcacctgaatattcttttagatttaatgataatagtatgaatgaatttattcaagatcctgctcttacattaatgcatgaattaatacattcattacatggactatatggggctaaagggattactacaaagtatactataacacaaaaacaaaatcccctaataacaaatataagaggtacaaatattgaagaattcttaacttttggaggtactgatttaaacattattactagtgctcagtccaatgatatctatactaatcttctagctgattataaaaaaatagcgtctaaacttagcaaagtacaagtatctaatccactacttaatccttataaagatgtttttgaagcaaagtatggattagataaagatgctagcggaatttattcggtaaatataaacaaatttaatgatatttttaaaaaattatacagctttacggaatttgatttagcaactaaatttcaagttaaatgtaggcaaacttatattggacagtataaatacttcaaactttcaaacttgttaaatgattctatttataatatatcagaaggctataatataaataatttaaaggtaaattttagaggacagaatgcaaatttaaatcctagaattattacaccaattacaggtagaggactagtaaaaaaaatcattagattttgtaaaaatattgtttctgtaaaaggcataaggaagcttcgcgaattc
